(19) United States
(12) Patent Application Publication
(10) Pub. No.: US 2024/0409645 A1
(43) Pub. Date: Dec. 12, 2024

(54) Binding Molecules Targeting IL-2 Receptor

(71) Applicant: DUALYX NV, Keerbergen (BE)

(72) Inventors: Luc Van ROMPAEY, Keerbergen (BE); Valentina LYKHOPIY, Zwijnaarde, Gent (BE); Susan Mariola SCHLENNER, Leuven (BE); Tom Lander VAN BELLE, Destelbergen (BE); Christophe Frederic Jerome BLANCHETOT, Destelbergen (BE); Tugsan TEZIL, Elsene (BE); Giel TANGHE, De Pinte (BE)

(21) Appl. No.: 18/703,456

(22) PCT Filed: Oct. 21, 2022
(86) PCT No.: PCT/EP2022/079483

§ 371 Date: Apr. 22, 2024

(30) Foreign Application Priority Data
Oct. 21, 2021 (GB) 2115122.0

(51) Int. Cl. C07K 16/28; A61K 39/00; A61P 37/06; G01N 33/53; G01N 33/58; G01N 33/68

(52) U.S. Cl. CPC C07K 16/2866; A61P 37/06; G01N 33/53; G01N 33/58; G01N 33/6869; A61K 2039/505; C07K 2317/31; C07K 2317/52; C07K 2317/565; C07K 2317/569; C07K 2317/74; C07K 2317/76; C07K 2317/92; G01N 2333/7155

(57) ABSTRACT

The present invention provides binding molecules, particularly antibodies, or antigen-binding portions thereof, which bind to the IL-2 receptor and selectively activate regulatory T cells. The invention further relates to compositions and therapeutic methods for use of these binding molecules for the treatment and/or prevention of autoimmune diseases, and/or other conditions responsive to therapy that is effective to a selective increase in numbers and activation of regulatory T cells over effector T cells.

### FIELD OF INVENTION

[0001] The present invention relates to binding molecules that bind to one or more of the polypeptide chains of interleukin-2 receptor, hence that bind to one or more of the interleukin-2 receptor α-chain (IL-2Rα, encoded by IL2RA; also known as CD25), interleukin 2 receptor β-chain (IL-2Rβ, encoded by IL2RB; also known as CD122) and the common cytokine receptor γ-chain (γc, encoded by IL2RG; also known as IL-2Rγ or CD132). The present invention further relates to the use of such binding molecules to target interleukin receptors (IL-2R), particularly the high affinity IL-2Rα/IL-2Rβ/γc, as well as the binding molecules for use in methods of treatment and diagnosis. Preferred binding molecules are antibodies, with particularly preferred binding molecules comprising, or consisting of, VHH domain antibodies.

### BACKGROUND OF INVENTION

[0002] IL-2 is a pleiotropic cytokine involved in immune system function, playing a role in immune responses and also immune tolerance. The main cells that release IL-2 are activated CD4⁺ T cells. IL-2 influences the differentiation, proliferation, survival, and activity of a wide range of immune cells. It can act on multiple cell types, including T regulatory cells (Tregs), type 2 innate lymphoid cells (ILC2), Natural Killer (NK) cells, T memory (Tmem) cells, effector T cells (Teffs), activated B cells, and monocytes. Stimulation by IL-2 is often key to the survival and proliferation of such immune system cells.

[0003] The functional receptor for IL-2, IL-2R, exists as a two-chain heterodimeric form with medium affinity for IL-2 and a high affinity three chain heterotrimeric form. In particular, three different chains can be present in a receptor for IL-2, those being the interleukin-2 receptor α-chain (IL-2Rα; CD25), interleukin 2 receptor β-chain (IL-2Rβ; CD122) and common cytokine receptor γ-chain (γc; IL-2Rγ; CD132). IL-2Rβ and γc can form an IL-2R complex with medium affinity for IL-2. IL-2Rα, IL-2Rβ and γc can together form a heterotrimeric IL-2R complex with high affinity for IL-2. The medium affinity two chain IL-2Rβ/γc receptor complex may be an intermediate in the formation of the higher affinity IL-2Rα/IL-2Rβ/γc receptor complex. IL-2Rα on its own has low affinity for IL-2, but binding of IL-2 to IL-2Rα may also play a part in the formation of IL-2Rα/IL-2Rβ/γc receptor complexes.

[0004] As IL-2Rα is the polypeptide chain which is unique to the trimeric IL-2Rα/IL-2Rβ/γc receptor complex, the higher expression of IL-2Rα on Treg cells means that they are most responsive to IL-2. Low dose IL-2 therapy has been used as a way to attempt to preferentially stimulate Tregs, whilst higher dose IL-2 has been used to try and stimulate T effector cells. Lower dose IL-2 has been investigated for treating autoimmune disorders. However, low dose therapy has poor specificity, short in vivo half-life, and the potential for immunogenicity. Higher dose IL-2 has been used in cancer therapy, but has undesirable side-effects, such as vascular leak syndrome (VLS), and different patients show different levels of responsiveness to the treatment. Thus, whilst offering promise, IL-2 therapy has been slow to enter the clinic for the benefit of many patients. Mutant forms of IL-2, IL-2 muteins, have also been developed with increased specificity for the high affinity IL-2Rα/IL-2Rβ/γc receptor complex, but which showed off-target binding to CD25+ cells.

[0005] Given the importance of IL-2 in the immune system, a real need remains to provide further and improved ways to target IL-2 and IL-2R complexes, particularly the higher affinity IL-2Rα/IL-2Rβ/γc receptor complex to modulate Tregs.

### SUMMARY OF THE INVENTION

[0006] The present invention provides binding molecules against the polypeptide chains of the interleukin-2 receptor (IL-2R). The binding molecules are, or comprise, single domain binding regions, particularly comprising heavy chain only antibodies, and especially VHH domain antibodies. The present invention provides binding molecules comprising, or consisting of, single domain binding regions that are able to bind at least one of the IL-2Rα, IL-2Rβ and γc. Preferred single domain binding regions are heavy chain only antibodies. Especially preferred single domain binding regions are VHH domain antibodies. Hence, in a particularly preferred embodiment, the binding molecule may be, or may comprise a VHH domain antibody or antibodies.

[0007] Typically, the binding molecules of the present invention do not comprise IL-2 or mutant forms of IL-2. One advantage of the binding molecules of the present invention is therefore that, unlike the mutant forms of IL-2 being developed in the art as therapeutics, they do not run the risk of inducing antibodies against a mutant IL-2 that will cross-react with endogenous IL-2.

[0008] In a particularly preferred embodiment, the binding molecules are able to bind all three of IL-2Rα, IL-2Rβ, and γc, and preferably bind the IL-2Rα/IL-2Rβ/γc receptor complex. Hence, the invention allows for the targeting of the IL-2Rα/IL-2Rβ/γc receptor complex and so of Tregs. Such binding molecules are able to preferentially target Treg cells that express high levels of the interleukin-2 receptor α chain associated with stable FoxP3 expression and immunosuppressive properties, hence in one preferred embodiment, the binding molecules may be used to target Treg cells, for instance to preferentially activate Treg cells. The ability to stimulate Treg cells means that one preferred use of the binding molecules of the present invention is in methods to treat or prevent autoimmune disorders.

[0009] In one particularly preferred embodiment, the binding molecules of the present invention are, or comprise, VHH domain antibodies. The present inventors have taken advantage of the versatility of VHH domains, and their single polypeptide chain nature, to generate various monospecific, bispecific, trispecific and multispecific binding molecules for targeting IL-2 receptors. In a preferred embodiment, the present invention provides a binding molecule comprising VHH domains that mean that the binding molecule is able to bind at least one of the interleukin-2 receptor α-chain, β-chain, and common cytokine receptor γ-chain. In a particularly preferred embodiment, the binding molecule comprises at least three VHH domains, with at least one VH domain specific against each of the interleukin-2 receptor α chain, β chain, and common γ chain.

[0010] The present invention provides a trispecific binding molecule comprising:
[0011] at least one single domain binding region specific for the IL-2α receptor α-chain;
[0012] at least one single domain binding region specific for the IL-2 receptor β-chain; and
[0013] at least one single domain binding region specific for the γc.

[0014] The present invention further provides a trispecific binding molecule of the present invention for use as a medicament.

[0015] The present invention further provides a trispecific binding molecule of the present invention for use in a method of treating or preventing an autoimmune disorder, or an inflammatory disorder, preferably wherein:
[0016] (a) the disorder is graft versus host disease (GvHD), preferably where the antibody is for use in a method where it is administered prior to, at the same time, or after a transplant of a cell, tissue, or organ;
[0017] (b) the disorder is one involving dysfunction or unwanted proliferation of leukocytes, preferably of T cells, more preferably of Teff cells; such disorders may present with an imbalance of Tregs compared to Teff cells;
[0018] (c) the disorder is selected from inflammatory bowel disease (IBD) (such as ulcerative colitis (UC), Crohn's disease, pouchitis or celiac disease), systemic lupus erythematosus (SLE), multiple sclerosis, type 1 diabetes, myasthenia gravis, pemphigus vulgaris, and bullous pemphigoid; or
[0019] (d) the disorder is selected from SLE, cGvHD, psoriasis, autoimmune hepatitis, ulcerative colitis, eczema.

[0020] The present invention further provides a method of stimulating cell proliferation comprising contacting a target cell expressing the IL-2Rα/IL-2Rβ/γc receptor complex with a trispecific binding molecule of the present invention.

[0021] The present invention also provides a pharmaceutical composition comprising a trispecific binding of the present invention and a pharmaceutically acceptable carrier.

[0022] The present invention further provides a method of detecting the IL-2Rα/IL-2Rβ/γc receptor complex comprising contacting a test sample with a binding molecule of the present invention and detecting binding of the binding molecule to the IL-2Rα/IL-2Rβ/γc receptor complex, preferably wherein the binding molecule is labelled and the binding of the antibody to the IL-2Rα/IL-2Rβ/γc receptor complex is detected via the label.

### BRIEF DESCRIPTION OF THE FIGURES

[0023] FIG. 1A shows the binding of selected VHH antibodies specific for the IL-2Rα-, β-, or γ-chain to HEK-Blue cells expressing all three of the IL-2R α-, β-, or γ-chain as measured by FACS analysis.

[0024] FIG. 1B shows the dose-response binding curves of selected monospecific monovalent IL-2Rα VHH antibodies to HEK cells expressing the trimeric IL-2Rα/β/γ as measured by FACS analysis. The format of a monospecific bivalent IL-2R subunit antibody used to obtain the results is shown above the graph.

[0025] FIG. 2 shows the ability of selected VHH antibodies specific for the IL-2Rα-, β-, or γ-chain to block binding of IL-2 to HEK-Blue cells expressing all three IL-2R chains as measured by FACS analysis. The higher the column in the graph, the greater the inhibition of binding of IL-2 to the HEK-blue cells by the antibody.

[0026] FIG. 3A shows results from testing the monospecific bi- and mono-valent VHH-hFc molecules specific for IL-2Rα/CD25 in a binding ELISA on human and cynomolgus monkey IL-2Rα/CD25 subunits. The structure of the monospecific monovalent and monospecific bivalent antibodies are shown below the graph.

[0027] FIG. 3B shows results from testing the monospecific bi- and mono-valent VHH-hFc molecules specific for IL-2Rβ/CD122 in a binding ELISA on human and cynomolgus monkey IL-2Rβ/CD122 subunits. The structure of the monospecific monovalent and monospecific bivalent antibodies assessed was the same as that shown below the graph in FIG. 3A.

[0028] FIG. 3C shows results from testing the monospecific bi- and mono-valent VHH-hFc molecules specific for IL-2Rγ/CD132 in a binding ELISA on human and cynomolgus monkey IL-2Rγ/CD132 subunits. The structure of the monospecific monovalent and monospecific bivalent antibodies assessed was the same as that shown below the graph in FIG. 3A

[0029] FIG. 4 summarises the VHH clones specific for the IL-2R α-, β-, or γ-chain employed to generate monospecific, bispecific, and trispecific antibodies, with the structure of the antibodies generated shown below the Table. The structures shown are monospecific, bispecific, or trispecific in the sense of whether they bind just IL-2R α alone (the structure on the left), bind IL-2R α and β (bivalent, bispecific structure in the middle), or bind all three of IL-2R α-, β-, and γ (the structure on the right). The structures are referred to as monovalent or bivalent in the sense of how many binding sites that they have individually for each of the IL-2R α-, β-, and γ chains present, even though the overall valency is higher (the structure on the left has an overall valency of two, that in the middle an overall valency of four, whist that on the right has an overall valency of three).

[0030] FIG. 5 shows hydrophobic interaction chromatography (HIC) chromatograms for two parental monospecific anti-IL-2Rα and bispecific anti-IL-2Rβ/γc antibodies and the heterodimeric trispecific anti-IL-2Rα/IL-2Rβ/γc antibody. The large peak in each chromatogram represents the main species of the antibody in the sample. The purity obtained for selected trispecific antibodies is indicated in the Table below the HIC chromatograms.

[0031] FIG. 6 shows the ability of particular monospecific, bispecific and trispecific antibodies to: bind HEK cells expressing IL-2Rα/IL-2Rβ/γc (top panel); inhibit binding of IL-2 to HEK cells expressing IL-2Rα/IL-2Rβ/γc (middle panel); and activate IL-2R signalling as measured by STAT5 phosphorylation.

[0032] FIG. 7A shows the dose-response binding curves of selected bispecific anti-IL-2Rβ/γ VHH antibodies to HEK cells expressing the trimeric IL-2Rα/β/γ as measured by FACS analysis. The antibodies assessed had a valency of two against each of the IL-2Rβ and γ chains and hence an overall valency of four.

[0033] FIG. 7B shows the dose-response binding curves of selected trispecific anti-IL-2Rα/β/γc VHH antibodies to HEK cells expressing the trimeric IL-2Rα/β/γ as measured by FACS analysis. The antibodies assessed had a valency of one against each of the IL-2R α β and γ chains and hence an overall valency of three.

[0034] FIG. 8 shows the ability of particular bispecific IL-2Rβ/γc and trispecific IL-2Rα/IL-2Rβ/γc antibodies to activate IL-2R signalling as measured by pSTAT5 phosphorylation in HEK cells expressing IL-2Rα/IL-2Rβ/γc, with the Table displaying EC50 (nM) and maximum signal values (% of live cells positive for phosphorylated STAT5).

[0035] FIG. 9A shows the pSTAT5 dose-response curves of selected bispecific monovalent anti-IL-2Rβ/γ VHH antibodies in HEK cells expressing the trimeric IL-2Rα/β/γ as measured by FACS analysis.

[0036] FIG. 9B shows the pSTAT5 dose-response curves of selected trispecific (monovalent) anti-IL-2Rα/β/γ VHH antibodies in HEK cells expressing the trimeric IL-2Rα/β/γ as measured by FACS analysis.

[0037] FIG. 9C shows the pSTAT5 dose-response curves of selected trispecific monovalent anti-IL-2Rα/β/γ VHH antibodies (cfr. FIG. 12C) in HEK cells expressing the trimeric IL-2Rα/β/γ as measured by FACS analysis.

[0038] FIG. 9D shows the pSTAT5 dose-response curves of tsVHH48 variants, in particular selected trispecific symmetrical, bivalent anti-IL-2α/β/γ (DC00011, DC00015, DC00019, DC00020, DC00021; cfr. FIG. 12A) and corresponding bispecific mono-(one armed, OA) and bivalent anti-IL-2β/γ VHH antibodies in HEK cells expressing the trimeric IL-2R α/β/γ as measured by FACS analysis.

[0039] FIG. 10A shows the ability of particular bispecific IL-2Rβ/γc and trispecific IL-2Rα/IL-2Rβ/γc antibodies to induce dose-dependent pSTAT5 activation of human PBMCs, with trispecific antibodies demonstrating enhanced selectivity and potency for human Tregs.

[0040] FIG. 10B shows the ability of monoparatopic tsVHH-48 geometry variants to induce dose-dependent pSTAT5 activation of human PBMCs, with particular trispecific IL-2Rα/IL-2Rβ/γc antibodies demonstrating enhanced selectivity and potency versus IL-2 or the parental tsVHH-48 for human Tregs over NK cells. Graphs represent data from one experiment with one PBMC donor.

[0041] FIG. 10C shows the ability of anti-CD25-biparatopic variants of ts VHH48 to induce dose-dependent pSTAT5 activation of human PBMCs, with particular trispecific biparatopic IL-2Rα/IL-2Rβ/γc antibodies demonstrating enhanced selectivity and potency versus the parental tsVHH48 for human Tregs over NK cells. Graphs represent data from one experiment with two PBMC donors.

[0042] FIG. 11 shows the ability of trispecific IL-2Rα/IL-2Rβ/γc antibodies to preferentially expand Tregs in human PBMC culture.

[0043] FIG. 12A shows illustrative examples of antibody formats that may be employed in the present invention.

[0044] FIG. 12B shows further illustrative examples of antibody formats that may be employed in the present invention.

[0045] FIG. 12C shows further illustrative examples of antibody formats that may be employed in the present invention. The upper panel illustrates antibodies employing the same VHH building blocks as used for tsVHH48, but with a different order and/or number of VHHs in one or both arms of the antibody thereby resulting in different overall geometries and/or valencies. The lower panel illustrates the use of tsVHH48 building blocks fused to one Fc tail, paired with CD25-binding VHHs belonging to different CDR3 families fused to a second Fc tail (the binding molecules therefore being biparatopic for CD25 and overall being tsVHHs in the sense of having at least one specificity for each of IL-2 α-, β-, and γ-).

[0046] FIG. 13 shows the result for treatment of aGvHD mice with tsVHH48.

[0047] FIG. 13A shows the survival and disease activity score of xenogeneic graft-versus-host-diseased mice treated with tsVHH48. The mice from the control group were injected intraperitoneally with 100 μg PBS (n=6 mice). Survival rates (A), weight loss (B) and the disease activity (C) are represented from one experiment. Data under B. and C. are represented as mean±SEM. P-value. Paired t-test (* p<0.05; ** p<0.005, *** p<0.0005).

[0048] FIG. 13B shows the frequency and proliferation of immune cells in blood over time. Blood was individually collected on a weekly basis and stained for flow cytometry analysis. Percentage of human CD45 engraftment (A), T lymphocytes (B), NK T cells (C), NK cells (D), CD8 T cells (E), effector CD8 T cells (F), proliferating CD8 T cells (G), CD4 T cells (H), effector CD4 T cells (I) and proliferating CD4 T cells (J) are respectively represented. Data are plotted as mean±SEM and represent one experiment.

[0049] FIG. 13C shows the frequency and proliferation of Tregs in blood over time. Blood was individually collected on a weekly basis and stained for flow cytometry analysis. Frequency (A) of Tregs (Foxp3+CD127− of the total CD4+ cells) and proliferating Tregs (B) are represented. Data are plotted as mean±SEM and represent one experiment.

### DETAILED DESCRIPTION

### Binding Molecules, Antibodies and IL-2 Receptors

[0050] The present invention provides binding molecules that are able to bind one or more of the polypeptide chains of the IL-2R. For example, the present invention provides a binding molecule that can bind all three of the polypeptide chains of the IL-2R, preferably which can bind all three at the same time.

[0051] The binding molecules provided are typically characterised as being, or comprising, single domain binding regions. A single domain binding region consists of a single domain able to bind a target. In one embodiment, the single domain binding region is characterised by not including an antibody light chain. In one embodiment, the binding molecule as a whole does not include an antibody light chain. An advantage of employing single domain binding regions is that it is easier to join together permutations of different single binding domains. In one particularly preferred embodiment the binding molecule is, or comprises, antibody-based sequences. In an alternative embodiment it does not. In one embodiment of the invention, a binding molecule does not comprise Fab binding regions.

[0052] In embodiments where a binding molecule of the present invention comprises antibody-based sequences, the binding molecule may be simply referred to as an antibody. Reference to an antibody may be used to refer to the overall structure, even if all of the constituents of the overall structure are not antibody based, the overall structure is not a naturally occurring antibody, or the overall structure includes non-antibody-based sequences. Reference to an “antibody” herein specifically encompasses an individual VHH molecule, as well as an antibody that comprises a VHH molecule as part of the overall structure. Hence, reference to an antibody is not limited to a four polypeptide IgG structure with two light and two heavy chain polypeptides, but also antibody structures where the overall structure is not a naturally occurring one, but the antibody still includes antibody-based sequences. For instance, whilst VHH heavy chain only antibodies are naturally occurring structures, antibodies that comprise more than one VHH molecule or domain are not naturally occurring, but they are still specifically part of the present invention and represent an “antibody” as defined herein. Reference to an antibody herein also includes antibodies that themselves therefore comprise antibodies as one of their constituent parts.

[0053] Reference to the “geometry” of a binding molecule and in particular an antibody refers in particular to the number, order, and what the antigen binding sites present bind for a given binding molecule. In one embodiment, the overall structure of the antibody is referred to the “format” of an antibody, with reference to an antibody format though not preferably being limiting to specific sequences.

[0054] In a preferred embodiment, the binding molecules of the present invention are, or comprise, heavy chain only antibodies (HCAb). Reference to a heavy chain only antibody includes molecules that represent the heavy chain of an antibody, but lack the CH1 domain, and which are able to bind antigen without needing an accompanying light chain. Reference to a heavy chain only antibody also include VHH domain antibodies, for instance from camelids and VNAR antibodies, for example from cartilaginous fish. In an especially preferred embodiment, a heavy chain antibody employed in the present invention is, or comprises, a VHH domain antibody. However, other types of HCAb may be employed such as human, rat or mouse HCAbs. In another embodiment, other single domain binding regions may be employed which are not antibody based. So, for instance, in one embodiment, the single domain binding regions employed are non-Ig engineered protein scaffolds such as darpins, affibodies, adnectins, anticalin proteins, or peptides and the like. So wherever reference to a VHH domain is used herein, as an alternative embodiment any HCAbs in general may be employed, as well as non-antibody based single domain binding regions, including any of those referred to herein. Further, wherever reference to a single binding domain is made herein, instead a heavy chain only antibody may be employed, with the term heavy chain only antibody encompassing both single binding domains, such as VHH, but also heavy chain only antibodies that are heavy chains able to bind antigen without a light chain, for instance heavy chains lacking a CH1 region.

[0055] In a preferred embodiment of the present invention, an antigen binding site present in a binding molecule of the present invention is a VHH domain. In one preferred embodiment, all of the antigen binding sites are provided by VHH domains. In one embodiment, a binding molecule, consisting of a VHH domain as set out herein is provided. In another embodiment, a binding molecule comprising at least one VHH domain as set out herein is provided. In one embodiment, a binding molecule comprising a VHH domain as a sole antigen binding site is provided. In a preferred embodiment a binding molecule of the present invention comprises at least two VHH domains as set out herein. In one embodiment, a binding molecule of the present invention comprises two different VHH domain as set out herein. The present invention provides a bispecific binding molecule comprising two different VHH domains as set out herein. In one preferred embodiment, a binding molecule of the present invention comprises at least three different VHH domains as set out herein. In one embodiment a binding molecule of the present invention is a trispecific comprising three different VHH molecules as set out herein. In a preferred embodiment, the VHH domain or VHH domains will all be specific for an IL-2R polypeptide chain.

[0056] VHH antibodies comprise three CDRs, CDR1, CDR2, and CDR3. Reference to a “set of CDRs” in relation to a VHH domain antibody refers to the CDR1, CDR2, and CDR3 of that VHH domain. So, for instance, TABLE 3 identifies preferred VHH domain antibodies which are individually provided, but which may also be used as constituents for a binding molecule of the present invention. So the present invention provides a binding molecule comprising a VHH domain as set out in TABLE 3.

[0057] TABLE 4 of the present application sets out the CDR sequences of the VHH domains from TABLE 3. The present invention also provides a binding molecule comprising a “set” of CDRs, so CDR1, CDR2, and CDR3, from

[0058] TABLE 4, so from one of the VHH domain antibodies in TABLE 3.

[0059] TABLE 7 of the present application provides the VHH domain sequences and CDR sequences for further VHH domain antibodies specific for the IL-2Rα polypeptide, with the invention providing such VHH antibodies, as well as a binding molecule comprising one of the VHH domain antibodies from TABLE 7, and also a binding molecule comprising a set of CDRs from one of the VHH domain antibodies from TABLE 7.

[0060] TABLE 8 of the present application provides the VHH domain sequences and CDR sequences for VHH domain antibodies specific for the IL-2Rβ polypeptide, with the invention providing such VHH antibodies, as well as a binding molecule comprising one of the VHH domain antibodies from

[0061] TABLE 8, and also a binding molecule comprising a set of CDRs from one of the VHH domain antibodies from TABLE 8. TABLE 9 of the present application provides the VHH domain sequences and CDR sequences for VHH domain antibodies specific for the IL-2Rγ polypeptide, with the invention providing such VHH antibodies, as well as a binding molecule comprising one of the VHH domain antibodies from TABLE 9, and also a binding molecule comprising a set of CDRs from one of the VHH domain antibodies from TABLE 9. The present invention also provides a VHH domain antibody, or a binding molecule comprising such a VHH domain, which comprises a set of CDR sequences from one of TABLES 3, 6, 7, or 8, but with different, or at least modified, framework sequences. As discussed herein variant sequences are also provided, so anywhere herein reference to a specific sequence is made, a variant sequence may also be employed, particularly a variant that retains ability to bind to the specific IL-2R polypeptide chain. In another embodiment, a variant may be one that has one or more CDRs with sequence modifications present, for instance a CDR may comprise one, two, three, or four sequence changes compared to the specific ones set out, with one, two, or three CDRs each having such a level of sequence change. In one embodiment, the sequence changes are conservative sequence changes. Variant sequences will typically retain binding activity, for instance having substantially the same binding activity for the target.

[0062] The binding molecule provided by the invention bind to one or more of the interleukin-2 receptor α-chain (IL-2Rα; CD25), interleukin 2 receptor β-chain (IL-2Rβ; CD122) and common cytokine receptor γ-chain (γc; IL-2Rγ; CD132). In a particularly preferred embodiment, the IL-2R polypeptide chain bound by a binding molecule of the present invention is human. The sequences of the human IL-2R polypeptide chains are provided as follows:
[0063] SEQ ID NO: 2036 provides the sequence of the human interleukin-2 receptor α-chain and an antibody of the invention may specifically bind that sequence:

MDSYLLMWGLLTFIMVPGCQAELCDDDPPEIPHATFKAMAYKEGT
MLNCECKRGFRRIKSGSLYMLCTGNSSHSSWDNQCQCTSSATRNT
TKQVTPQPEEQKERKTTEMQSPMQPVDQASLPGHCREPPPWENEA
TERIYHFVVGQMVYYQCVQGYRALHRGPAESVCKMTHGKTRWTQP
QLICTGEMETSQFPGEEKPQASPEGRPESETSCLVTTTDFQIQTE
MAATMETSIFTTEYQVAVAGCVFLLISVLLLSGLTWQRRQRKSRR
TI
(SEQ ID NO: 1865->NP 000408.1 interleukin-2
receptor subunit alpha
isoform 1 precursor [Homo sapiens])

[0064] SEQ ID NO: 2037 provides the sequence of the human interleukin-2 receptor β-chain and an antibody of the invention may specifically bind that sequence:

MAAPALSWRLPLLILLLPLATSWASAAVNGTSQFTCFYNSRANIS
CVWSQDGALQDTSCQVHAWPDRRRWNQTCELLPVSQASWACNLIL
GAPDSQKLTTVDIVTLRVLCREGVRWRVMAIQDFKPFENLRLMAP
ISLQVVHVETHRCNISWEISQASHYFERHLEFEARTLSPGHTWEE
APLLTLKQKQEWICLETLTPDTQYEFQVRVKPLQGEFTTWSPWSQ
PLAFRTKPAALGKDTIPWLGHLLVGLSGAFGFIILVYLLINCRNT
GPWLKKVLKCNTPDPSKFFSQLSSEHGGDVQKWLSSPFPSSSFSP
GGLAPEISPLEVLERDKVTQLLLQQDKVPEPASLSSNHSLTSCFT
NQGYFFFHLPDALEIEACQVYFTYDPYSEEDPDEGVAGAPTGSSP
QPLQPLSGEDDAYCTFPSRDDLLLFSPSLLGGPSPPSTAPGGSGA
GEERMPPSLQERVPRDWDPQPLGPPTPGVPDLVDFQPPPELVLRE
AGEEVPDAGPREGVSFPWSRPPGQGEFRALNARLPLNTDAYLSLQ
ELQGQDPTHLV
(SEQ ID NO: 1866->NP 000869.1
interleukin-2 receptor subunit beta
precursor [Homo sapiens])

[0065] SEQ ID NO: 2038 provides the sequence of the human interleukin-2 receptor γ-chain and an antibody of the invention may specifically bind that sequence:

MLKPSLPFTSLLFLQLPLLGVGLNTTILTPNGNEDTTADFFLTTM
PTDSLSVSTLPLPEVQCFVENVEYMNCTWNSSSEPQPTNLTLHYW
YKNSDNDKVQKCSHYLFSEEITSGCQLQKKEIHLYQTFVVQLQDP
REPRRQATQMLKLQNLVIPWAPENLTLHKLSESQLELNWNNRFLN
HCLEHLVQYRTDWDHSWTEQSVDYRHKFSLPSVDGQKRYTFRVRS
RFNPLCGSAQHWSEWSHPIHWGSNTSKENPFLFALEAVVISVGSM
GLIISLLCVYFWLERTMPRIPTLKNLEDLVTEYHGNFSAWSGVSK
GLAESLQPDYSERLCLVSEIPPKGGALGEGPGASPCNQHSPYWAP
PCYTLKPET
(SEQ ID NO: 1867->NP_000197.1 cytokine
receptor common subunit gamma precursor
[Homo sapiens])

[0066] In other embodiments of the present invention the binding molecule may bind to IL-2R polypeptide chains from any of the species mentioned herein. In one preferred embodiment, a binding molecule of the present invention may bind to both the human IL-2R polypeptide and the corresponding mouse polypeptide. In another embodiment, a binding molecule may bind the human polypeptide, but not bind the mouse polypeptide.

[0067] In one embodiment, a binding molecule of the present invention will bind to a cell expressing an IL-2Rα/IL-2Rβ/γc complex. In another embodiment, a binding molecule of the present invention will bind to a cell expressing an IL-2Rβ/γc complex. In a preferred embodiment, a binding molecule of the present invention will bind preferentially to (for instance it may be specific for, or specifically interact with, or specifically bind) cells expressing IL-2Rα/IL-2Rβ/γc complex over cells expressing IL-2Rβ/γc complex. In one embodiment, a binding molecule may bind both an IL-2Rα/IL-2Rβ/γc complex and an IL-2Rβ/γc complex.

[0068] In one preferred embodiment, a binding molecule of the present invention will bind to an IL-2Rα/IL-2Rβ/γc receptor complex and stimulate IL-2R signalling. IL-2R complexes are thought to signal through a pathway involving the tyrosine kinases Jak1 and Jak3 which are associated respectively with IL-2Rβ and γc. Phosphorylation of IL-2Rβ leads to activation of the MAPK, PI-3K and predominately the Stat5 transcription factor. In one embodiment, a binding molecule of the invention may act as an agonist of the IL-2R complex, for instance increased phosphorylation of STAT5 may be seen in the target cell when contacted with a binding molecule of the invention. In one embodiment MAPK, PI-3K, and/or STAT5 may be activated, for instance all three may be activated, or at least STAT5. In one embodiment, downstream members of the STAT5 signalling pathway may be activated. In another embodiment, a binding molecule of the present invention may act as an antagonist of IL-2R activation. In one preferred embodiment, a binding molecule of the present invention blocks or inhibits the binding of IL-2 to an IL-2R, so for instance decreased STAT5 phosphorylation may be seen when a cell expressing IL-2Rα/IL-2B/γc complex is incubated with the binding molecule and IL-2 compared to when the cell is incubated with only IL-2. In another embodiment, a binding molecule of the present invention binds to the receptor, but does not also prevent IL-2 binding to the receptor as well.

[0069] The specificity of a binding molecule, in particular of an antibody, denotes what epitope/antigen it binds. In a particularly preferred embodiment, it will be used to denote how many different antigens a binding molecule binds. Thus a monospecific antibody binds one antigen. A bispecific antibody binds two antigens. A trispecific antibody binds three antigens. In relation to IL-2Rα, IL-2Rβ, and γc, a monospecific antibody will be said to bind one of those chains, a bispecific two, and a trispecific three. Hence, a trispecific antibody is one that has at least one binding site for each of IL-2Rα, IL-2Rβ, and γc. If an antibody has binding sites for more than one epitope on one of IL-2Rα, IL-2Rβ, and γc that will not change whether the antibody is said to be monospecific, bispecific, or trispecific in relation to IL-2Rα, IL-2Rβ, and γc, but will be instead denoted using biparatopic, triparatopic and so on nomenclature. Thus, an antibody with two different binding sites for IL-2Rα which each bind a different epitope of IL-2Rα will be referred to herein as a biparatopic antibody in relation to IL-2Rα. An antibody with three different binding sites each recognising a different epitope of IL-2Rα will be referred to as tri-paratopic in relation to IL-2Rα. Such nomenclature may also be used in relation to other antigens including IL-2Rβ, and γc.

[0070] The valency of a binding molecule, in particular an antibody, denotes the number of antigen-binding sites it has. A binding molecule of the present invention will have a valency of at least one. For instance, a binding molecule of the invention may have a valency of one. It may have a valency of two. It may have a valency of three. It may have a valency of four. In one embodiment, an antibody may have a valency of five. In another embodiment, it may have a valency of six. In another embodiment, it may have a valency of seven. In a further embodiment, it may have a valency of eight. In one embodiment, a binding molecule of the invention has at least those values as a valency. In one embodiment, a binding molecule of the invention has a valency of those values for IL-2R polypeptides. In one embodiment, reference to a valency may indicate how many binding sites are present for a given antigen. Hence, for example, a molecule may be referred to as bivalent for IL-2Rα to denote the number of binding sites for IL-2Rα, even though the overall number of binding sites for different antigens, and hence the overall valency is greater.

[0071] In one particularly preferred embodiment, a binding molecule is biparatopic for at least one of IL-2R α β, and γc. Preferably it is biparatopic for at least IL-2R α. In one particularly preferred embodiment, a binding molecule is trispecific in respect of IL-2R α, β, and γc, so having binding sites for all three, and is at least biparatopic for at least one of IL-2R α β, and γc. In a further particularly preferred embodiment, a binding molecule is trispecific in respect of IL-2R α, β, and γc, so having binding sites for all three, and is at least biparatopic for IL-2R α. In one preferred embodiment, a binding molecule, particularly an antibody, of the present invention is biparatopic for IL-2R α, but is monoparatopic for the other IL-2R chain or chains. In one preferred embodiment, a binding molecule, in particular an antibody, is trispecific for IL-2R α, β, and γc, biparatopic for IL-2R α, and is monoparatopic for β, and γc. In another preferred embodiment, a binding molecule, in particular an antibody, of the invention has more binding sites for IL-2R α, than for either of IL-2R β, and γc.

[0072] The strength of binding of an individual binding site to an IL-2R polypeptide may be referred to as the affinity of the binding site for its target, the IL-2R polypeptide. Whilst the overall strength of binding of a binding molecule is often also referred to as the affinity of the binding molecule, where the binding molecule has more than one binding site, the strength of binding may be referred to using the term avidity, which reflects the overall strength of binding when all of the binding sites of the binding molecule are taken into account.

[0073] As well as the preferred tri-specific binding molecules set out herein, all of the specific and variant sets of CDRs, VHH domains and polypeptides are also provided in the context of binding molecules that just bind one IL-2R α, β, and γc, as well as versions that bind two of IL-2R α, β, and γc. Hence, the binding sites set out herein may be provided as well as monovalent molecules binding the relevant one of IL-2R α, β, and γc. They are also provided where binding sites for two of IL-2R α, β, and γc are present, but not for all three. For example, a binding molecule of the present invention may also be provided which binds β, and γc, but not IL-2R α.

[0074] In one preferred embodiment, a binding molecule of the present invention will bind an IL-2Rα/IL-2Rβ/γc complex preferentially compared to an IL-2Rβ/γc complex. For instance, the strength of binding for the former compared to the latter may be at least 2, 10, 50, 100, 500, 1000 or more times higher. In one embodiment, the strength of binding may be at least 10,000, or at least 100,000 times greater. So, for instance, the avidity of the binding molecule for the IL-2Rα/IL-2Rβ/γc complex may be greater than that for the IL-2Rβ/γc complex. In one embodiment, a binding molecule of the present invention may be selective for the IL-2Rα/IL-2Rβ/γc complex over the IL-2Rβ/γc complex, in the sense that it specifically binds the trimeric receptor complex, but not the dimeric complex, or does not significantly bind it.

[0075] In another embodiment, a binding molecule of the present invention will bind both an IL-2Rα/IL-2Rβ/γc complex and an IL-2Rβ/γc complex. In one embodiment, the binding molecule may bind both IL-2Rα/IL-2Rβ/γc and IL-2Rβ/γc complexes, but bind the former with greater strength because extra binding site or sites are binding IL-2Rα as well as IL-2Rβ and γc. For example, in the case of a trispecific binding molecule it may be that it binds the IL-2Rα/IL-2Rβ/γc complex with greater strength because three binding sites are binding that complex, rather than the two that bind an IL-2Rβ/γc complex. In another embodiment, the binding molecule may preferentially bind the IL-2Rα/IL-2Rβ/γc complex because the binding molecule comprises more binding sites for IL-2Rα than the number of binding sites it has individually for either of IL-2Rβ and γc. In another embodiment, the binding molecule may preferentially bind the IL-2Rα/IL-2Rβ/γc complex because the binding site or sites for IL-2Rα are individually of higher affinity than those for either of IL-2Rβ and γc. In a further embodiment, the binding molecule may have a higher avidity for the IL-2Rα/IL-2Rβ/γc complex because of a combination of those factors.

[0076] In one embodiment, an antigen binding domain of a binding molecule of the invention for its target IL-2R polypeptide may have a K_{D} which is about 400 nM or smaller, 200 nM or smaller such as about 100 nM, 50 nM, 20 nM, 10 nM, 1 nM, 500 pM, 250 pM, 200 pM, 100 pM or smaller. In one embodiment, the K_{D} is 50 pM or smaller. In one embodiment, the KD of an individual antigen-binding site of a binding molecule of the present invention may be less than 1 μM, less than 750 nM, less than 500 nM, less than 250 nM, less than 200 nM, less than 150 nM, less than 100 nM, less than 75 nM, less than 50 nM, less than 10 nM, less than 1 nM, less than 0.1 nM, less than 10 pM, less than 1 pM, or less than 0.1 pM. In some embodiments, the K_{D} is from about 0.1 pM to about 1 μM. It may be an individual antigen-binding domain has such K_{D}. It may be that such a K_{D} is displayed by the overall binding molecule of the invention for the IL-2R polypeptide. It may be that such a K_{D} is displayed for IL-2Rα/IL-2Rβ/γc complexes.

[0077] In one embodiment, an antigen binding domain of a binding molecule of the invention for its target IL-2R polypeptide may have an EC50 which is about 400 nM or smaller, 200 nM or smaller such as about 100 nM, 50 nM, 20 nM, 10 nM, 1 nM, 500 pM, 250 pM, 200 pM, 100 pM or smaller. In one embodiment, the EC50 is 50 pM or smaller. In one embodiment, the EC50 of an individual antigen-binding site of a binding molecule of the present invention may be less than 1 μM, less than 750 nM, less than 500 nM, less than 250 nM, less than 200 nM, less than 150 nM, less than 100 nM, less than 75 nM, less than 50 nM, less than 10 nM, less than 1 nM, less than 0.1 nM, less than 10 pM, less than 1 pM, or less than 0.1 pM. In some embodiments, the EC50 is from about 0.1 pM to about 1 μM. It may be an individual antigen-binding domain has such EC50. It may be that such a EC50 is displayed by the overall binding molecule of the invention for the IL-2R polypeptide. It may be that such a EC50 is displayed for IL-2Rα/IL-2Rβ/γc complexes.

[0078] Binding, including the presence or absence of binding, can be determined using a variety of techniques known in the art, for example but not limited to, equilibrium methods (e.g., enzyme-linked immunoabsorbent assay (ELISA); KinExA, Rathanaswami et al. Analytical Biochemistry, Vol. 373:52-60, 2008; or radioimmunoassay (RIA)), or by a surface plasmon resonance assay or other mechanism of kinetics-based assay (e.g., BIACORE™ analysis or Octet™ analysis (forteBIO)), and other methods such as indirect binding assays, competitive binding assays fluorescence resonance energy transfer (FRET), gel electrophoresis and chromatography (e.g., gel filtration). Binding to the IL-2Rα/IL-2Rβ/γc and IL-2Rβ/γc complexes may be, for instance, measured using cells expressing such complexes, preferably where such complexes are human. In one embodiment, HEK cells expressing the trimeric IL-2 receptor are used to measure binding, for instance via FACS.

[0079] In one particularly preferred embodiment, a binding molecule of the invention may have greater potency for targeting cells that express IL-2Rα/IL-2Rβ/γc versus that displayed by IL-2Rβ/γc alone. For instance, a binding molecule of the invention may preferentially activate cells expressing IL-2Rα/IL-2Rβ/γc versus those expressing the IL-2Rβ/γc alone. In one embodiment, a binding molecule of the present invention may be used to preferentially target Treg cells because of their higher level of expression of the IL-2Rα/IL-2Rβ/ye receptor and hence to preferentially activate Treg cells versus other cell types, including Teff cells. In one embodiment, a binding molecule of the present invention activates Tregs by a factor of at least 5, ten, 50, 100, or 1000 fold more than it does other cells, for instance Teff cells. In one embodiment, employing a binding molecule of the present invention shifts the balance of an immune response from one characterised by Teff cells to Treg cells.

### Constant Regions

[0080] In one embodiment, a binding molecule, in particular an antibody, of the present invention does not comprise a constant region. However, in one preferred embodiment of the present invention the binding molecule of the present invention is an antibody that comprises a constant region. For instance, in one embodiment an antibody of the present invention comprises a polypeptide comprising a VHH domain and an Fc region. The constant region, if present, can be from any class of antibody, for instance can be a gamma, mu, alpha, delta, or epsilon constant region, or a part thereof. In a particularly preferred embodiment, the constant region is an IgG constant region. For instance, it may be an IgG1, IgG2, IgG3, or IgG4 constant region. The IgG1 constant region, or part thereof, is particularly preferred. In a particularly preferred embodiment, the constant region is an Fc region and so comprises the CH2 and CH3 domains, but does not comprise a CH1 domain. Hence, reference herein to a constant region or a heavy chain constant region encompasses such a constant region lacking a CH1 region. Where the antibody comprises two polypeptides that combine to form an Fc region, it may be that the individual polypeptides comprise charge and/or shape modifications that lead preferentially to the formation of heterodimers and so bring two polypeptides carrying VHH domains for different specificities together, rather than identical polypeptides with VHH domains for the same specificity. Additionally, or alternatively, the constant regions may comprise such modifications that allow the separation of heterodimers from homodimers. In one preferred embodiment, a binding molecule, and in particular an antibody, of the present invention does not comprise a light chain.

[0081] Fc domain as employed herein generally refers to —(CH2CH3)₂, unless the context clearly indicates otherwise, where CH2 is the heavy chain CH2 domain, CH3 is the heavy chain CH3 domain, and there are two CH2CH3 with one from each heavy chain.

[0082] In one preferred embodiment, a binding molecule, and in particular an antibody, of the present invention does not bind Fc receptors and in particular does not bind to Fc gamma receptors (FcγR). In one preferred embodiment, the binding molecule, and in particular antibody, does not bind to Fc receptors, either because it does not comprise a constant region or alternatively because its Fc region is modified so that it does not bind Fc receptors. In one embodiment, a binding molecule, and in particular an antibody, of the present invention binds to an FcγR, but to a substantially decreased extent relative to binding of an identical antibody comprising an unmodified Fc region to the FcγR (e.g., a decrease in binding to a FcγR by at least 70%, at least 80%, at least 90%, at least 95%, at least 98%, at least 99%, or 100% relative to binding of the identical antibody comprising an unmodified Fc region to the FcγR as measured). In a particularly preferred embodiment though the binding molecule, and in particular the antibody, has no detectable binding to an FcγR at all.

[0083] In one embodiment, where an Fc region is present in an antibody of the present invention, the Fc region employed is mutated, in particular comprising a mutation described herein. In one embodiment the mutation is to remove binding to Fe receptors and in particular FcγR. In one preferred embodiment the antibody has been mutated so that it does not bind Fc receptors. In one embodiment, an antibody may comprise an aglycosylated Fc region, for example to bring about reduced Fc function and in particular a nearly Fc-null phenotype. In one embodiment, an antibody has a modification at N297 and in particular N297A. In one embodiment an antibody has modifications at F243 and/or F244 of the constant region, in particular ones that mean that the antibody comprises a glycosylated constant region. In one embodiment, an antibody may comprise the F243A and/or F244A heavy chain modifications. In another embodiment, one or more of F241, F243, V262 and V264 may be modified and particularly to amino acids that influence glycosylation. In one embodiment, an antibody may have modifications at F241A, F243A, and/or V262E. In one embodiment, it may have the modification V264E. Such modifications are discussed in Yu et al. (2013) Journal of the American Chemical Society, 135 (26): 9723-9732, which is incorporated by reference in its entirety, particularly in relation to the modifications discussed therein. In one particular preferred embodiment, an antibody of the present invention may comprise the LALA modification, Leu234Ala/Leu235Ala. In another particularly preferred embodiment, an antibody of the present invention may comprise the LFLEPS modification, Leu234Phe/Leu235Glu/Pro331/Ser. Further, a binding molecule, in particular an antibody, of the present invention may be produced in a cell type that influences glycosylation as a further approach for sugar engineering. In one embodiment, the fucosylation, sialylation, galactosylation, and/or mannosylation may be altered either by sequence modifications and/or via the type of cell used to produce the binding molecule, and in particular antibody.

[0084] In one embodiment, an antibody has modifications at position 297 and/or 299. For example, in one embodiment, an antibody of the present invention comprises a N297A modification in its heavy chains, preferably N297Q or mutation of Ser or Thr at 299 to other residues. In one embodiment it has both those modifications. In one embodiment, an antibody comprises two different heavy chain constant regions where the heavy chain constant regions comprise modifications that allow the different heavy chains to preferentially associate compared to heavy chains associating with identical heavy chains. In one embodiment, the two different heavy chains comprise knob-in-hole mutations. In certain embodiments, the knob-into-hole mutations are a T366W mutation in one heavy chain constant region and a T366S, L368A, and a Y407V mutation in the other domain. In certain embodiments, the modifications comprise charge-pair mutations. In certain embodiments, the charge-pair mutations are a T366K mutation in one of the heavy chain constant regions and a corresponding L351D mutation in the other domain. In an alternative embodiment, rather than have modifications that result in preferential pairing of different heavy chain constant regions the heavy chain constant regions comprise modifications that mean a heterodimer comprising the two heavy chain constant regions can be purified preferentially from the homodimers only comprising one type of heavy chain constant region. For example, the modifications may alter affinity for Protein A, with one heavy chain constant region still able to bind Protein A, whilst the modified heavy chain constant region does not do so, meaning that heterodimers of the two different heavy chains can be purified based on their affinity for Protein A.

[0085] In other embodiments, a binding molecule, in particular an antibody, may comprise a modification that changes whether or not a disulfide bridge is formed.

[0086] In one embodiment, binding molecules, and in particular antibodies, of the present invention may comprise modifications that alter serum half-life. Hence, in another embodiment, an antibody of the present invention has Fc region modification(s) that alter the half-life of the antibody. Such modifications may be present as well as those that alter Fc functions. In one particularly preferred embodiment, a binding molecule, and in particular an antibody, of the present invention has modification(s) that alter its serum half-life compared to in the absence of such modifications. In one embodiment, the modifications result in increased serum half-life. In another embodiment, they result in decreased serum half-life. In another preferred embodiment, an antibody comprises one or more modifications that collectively both silence the Fc region and decrease the serum half-life of the antibody compared to an antibody lacking such modifications.

[0087] Illustrative examples of constant region modifications that may be included in particular embodiments of the invention include:
[0088] N297A-Asn297Ala which confers Fc silencing;
[0089] LALA-Leu234Ala/Leu235Ala which decreases binding to Fc receptors;
[0090] LFLEPS-Leu234Phe/Leu235Glu/Pro331/Ser which decreases binding to Fc receptors;
[0091] PG-Pro329Gly which decreases binding to Clq;
[0092] LALA-PG-Leu234Ala/Leu235Ala/Pro329Gly which decreases binding to Fc receptors and Clq;
[0093] TM-Pro331Ser/Leu234Glu/Leu235Phe-which decreases binding to Fc receptors and Clq;
[0094] DA-Asp265Ala-which decreases binding to Fc receptors;
[0095] GRLR-Gly236Arg/Leu328Arg-which decreases binding to Fc receptors; and
[0096] cFAE-K409R/F405L which promote heterodimer formation.

[0097] The LALA-PG, and cFAE modifications are particularly preferred, for instance in one embodiment the constant regions will include all of those modifications. In one preferred embodiment, the LALA modifications are present. FIG. 12A also shows examples of modifications that may be employed individually or together with each other in antibodies.

[0098] In another embodiment, a binding molecule, particularly an antibody, may lack one of the constant region modifications set out herein.

### Monospecific Binding Molecules and Binding Molecules Comprising VHH Domains

[0099] In one embodiment, a binding molecule, particularly an antibody, of the invention is monospecific and recognises just one of the IL-2R polypeptide chains. For example, the present invention provides VHH domains and in one embodiment the binding molecule provided is simply a VHH domain, such as one of those detailed herein. Hence, in one embodiment, the binding molecule provided is an antibody which is monospecific and monovalent, particularly being a VHH domain. In one embodiment, a binding molecule, in particular an antibody, of the present invention may comprise other sequences to the VHH domain, but only includes the VHH domain as a single antigen-binding site.

[0100] In one embodiment, the present invention provides a monospecific antibody, comprising, or consisting of, one of the VHH domain antibodies set out in TABLE 3 of the present application or a variant of such a VHH domain antibody. In another embodiment, the present invention provides a monospecific antibody comprising, a set of three CDRs from one of the VHH domain antibodies of TABLE 4 or variants of such CDRs. In another embodiment, the present invention provides a monospecific antibody comprising a VHH domain selected from one of those identified in TABLES 6 to 8 of the present application. In another embodiment, a monospecific antibody is provided comprising a set of three CDRs from one of the VHH domain antibodies identified in Tables 3 and 6 to 8 or a variant set of CDRs. In one embodiment, the invention also provides variants of such antibodies, for instance, where a CDR comprises one, two, three, or four sequence changes compared to the specific sequence set out. In one embodiment, one, two or three CDRs may have such a level of sequence changes.

[0101] As well as providing the VHH domains individually, the present invention also provides antibodies comprising one or more of the VHH domains as discussed further below. Thus, also provided is an antibody comprising at least one of the VHH domains set out in TABLES 2 and 6 to 8. Further provided is an antibody comprising a CDR set comprising the CDR1, CDR2, and CDR3 of one of the VHH domain antibodies set out in FIGS. 2 and 6 to 8. Antibodies which comprise variants of those VHH domains or CDR sets are further provided.

### Linkers

[0102] In a preferred embodiment, binding molecules, in particular antibodies, of the invention comprise more than one antigen-binding site on the same polypeptide. For example, in one embodiment, an antibody of the present invention comprises at least two VHH domains present in the same polypeptide. In one embodiment, an antibody of the present invention comprises two VHH domains on the same polypeptide. In another embodiment, an antibody of the present invention comprises at least three, and preferably three, VHH domains as part of the same polypeptide. In one embodiment, a binding molecule, in particular an antibody, of the present invention may comprise one or more linkers. For instance, a linker may be a non-antibody sequence used to join together different VHH domains and hence aid in providing a polypeptide with several active VHH domains. Any suitable linker may be employed, for instance linkers that are employed in the Examples of the present application or a variant linker sequence.

### Bispecific Binding Molecules

[0103] In one embodiment, a binding molecule of the present invention is bispecific binding two different antigens. In one preferred embodiment an antibody of the present invention is a bispecific antibody. For instance, the present invention provides a bispecific binding molecule, in particular a bispecific antibody, that recognises two of the chains of the IL-2R, particularly the IL-2Rβ and γc. In a preferred embodiment, a bispecific antibody provided by the present invention comprises one of the VHH domain antibodies set out in TABLES 2, 6, 7, and 8, more preferably two such VHH domain antibodies. In another preferred embodiment, a bispecific antibody provided by the present invention comprises a set of CDRs from one of the VHH domain antibodies set out in TABLES 3, 6, 7, and 8, more preferably two sets of CDRs from those VHH domain antibodies. The antibody may comprise a variant of those specific sequences, for instance one with one, two, three, or more amino acid sequence changes. In one embodiment, such sequence variations may be in the framework regions, in another they may be in the CDRs themselves.

[0104] In one preferred embodiment, one VHH domain, or set of CDRs, is from those in TABLES 2, 3 and 6 and is specific for IL-2Rα. In another preferred embodiment, one VHH domain, or set of CDRs, is from those in TABLES 3 and 7 and is specific for IL-2Rβ. In another embodiment, one VHH domain, or set of CDRs, is from those in TABLES 2, 3 and 8 and is specific for IL-2Rγ. In one embodiment, one VHH domain, or set of CDRs, is from those in TABLES 2, 3 and 7 and is specific for IL-2Rβ and one VHH domain, or set of CDRs, is from those in TABLES 2, 3 and 8 and is specific for IL-2Rγ.

### Trispecific and Multi-Specific Binding Molecules

[0105] In one preferred embodiment, a binding molecule, in particular an antibody, of the present invention is multi-specific and so has at least two specificities. In a further preferred embodiment, a binding molecule, in particular an antibody, of the present invention has at least three specificities. In an especially preferred embodiment, a binding molecule, in particular an antibody, of the present invention is trispecific. In particularly preferred embodiment, a binding molecule, in particular an antibody, of the present invention is trispecific with a specificity for each of the three polypeptide chains of the IL-2R, so for the IL-2Rα-, β-, and γ-chains. In another embodiment, the binding molecule, in particular an antibody, has those specificities, plus at least one other specificity as well. For instance, in one embodiment the other specificity is for serum albumin.

[0106] Any suitable trispecific format may be used for a trispecific antibody of the present invention and in particular any suitable trispecific antibody format. In one embodiment, the antibody is a single polypeptide chain comprising three VHH domains, with each domain specific for a different IL-2R polypeptide chain, so IL-2Rα, IL-2Rβ, and γc. In one embodiment, the polypeptide also comprises a constant domain, for instance comprising a CH2-CH3 region, and in another a CH1-CH2-CH3. In one instance, the polypeptide also comprises linkers joining together the different VHH domains and optionally to the constant region. The constant region may, for example, include modifications to prevent association with other constant regions to maintain the antibody as a single polypeptide chain. In another embodiment, the antibody does not comprise any constant region and is a single chain polypeptide.

[0107] In one particularly preferred embodiment, a binding molecule, in particular an antibody, of the present invention comprises two polypeptides. For instance, an antibody may comprise two polypeptide chains with a constant region to allow the two polypeptide chains to associate. In one preferred embodiment, such a two-polypeptide antibody is a trispecific antibody or is trispecific for the three different IL-2R polypeptide chains and may also comprise other specificities. Any combination of antigen binding sites giving the required trispecificity may be employed. For example, in a preferred embodiment, one polypeptide chain comprises a VHH domain specific for one of the IL-2R receptor polypeptides, with the other polypeptide chain comprising two VHH domains for the specificities of the other two IL-2R polypeptide chains. So, for example, an antibody may have the format a/b-g where “a” denotes a VHH with specificity for IL-2Rα, “b” denotes a VHH with specificity for IL-2Rβ, “g” denotes a VHH with specificity for γc, and “/” denotes the changeover from the first to second polypeptide being defined, where within a polypeptide the VHH domains are defined in N to C-terminal order. Where a polypeptide chain has a binding domain or binding domains at the C terminus of a constant region in a polypeptide, the binding domain or domains may be denoted by cterm-a, cterm-a-a and so on. The “-” may be a linker or simply denote joining of the VHH domains to each other. Examples of possible formats that may be employed which include one VHH on one polypeptide and two VHHs on the other include: a/b-g; a/g-b; b/a-g; b/g-a; g/a-b; and g/b-a. In another embodiment, an antibody of the present invention comprises two polypeptides where each polypeptide comprises two VHH domains, with collectively the two polypeptides comprising at least one VHH specific for each IL-2R chain. That may mean, for example, that collectively for one of the IL-2R polypeptides there are two VHH domains present in that antibody that are specific for that IL-2R polypeptide chain. So, examples of possible formats that may be include, using the numbering system discussed above: a-a/b-g; a-a/g-b; b-b/a-g; b-b/g-a; g-g/a-b; and g-g/b-a. Some of the Figures of the present application use the Greek symbols α β γ but the structures may also be set out using the equivalent “a”, “b”, and “c” format, or using the equivalent “alpha”, “beta”, and “gamma” format, or using the equivalent “CD25”, “CD122”, and “CD132” format as well.

[0108] In a further embodiment, an antibody of the present invention may comprise two polypeptides where:
[0109] one polypeptide chain comprises at least two VHH domains, where the at least two VHH domains include two VHHs specific for different IL-2R polypeptides; and
[0110] the other polypeptide chain comprises at least one VHH,
[0111] where collectively the two polypeptides have at least one VHH for each of the three IL-2R polypeptides. In one embodiment, each polypeptide comprises three VHH domains.

[0112] In one embodiment of the present invention has a valency of one, two, or three for one of the IL-2R polypeptides, where the antibody also has binding sites for each of the other two IL-2R polypeptides. In one embodiment, all of the antigen binding sites on one polypeptide have the same specificity, with the other polypeptide providing the antigen binding sites specific for the other two IL-2R polypeptides.

[0113] FIG. 12A and FIG. 12B and FIG. 12C of the present application provides illustrative examples of possible trispecific antibody formats comprising VHH domains, where collectively there is at least one VHH specific for each IL-2R polypeptide. An antibody of the present invention may be provided in any of those formats.

[0114] In any of the above discussed formats, at least one additional VHH may be present which is specific for something other than an IL-2R polypeptide, for instance, a VHH specific for serum albumin may be present. Any of the different antibody formats discussed herein may be employed with any of the heavy chain Fc region modifications discussed herein, examples of preferred modifications which may be present include those shown in FIG. 12A to 12C.

### Illustrative Antibodies and VHH Domains of the Present Invention

[0115] TABLE 3 provides examples of particularly preferred VHH domain antibodies of the present invention, with TABLE 4 providing the CDR sequences for those VHH domains. Those VHH domains may be, for instance, employed in any of the antibody formats discussed herein, as may be CDR sets from those VHHs, and variants of either.

[0116] TABLE 7 provides examples of further preferred VHH domains specific for IL-2Rα polypeptide and CDR sets from them that may be employed in any of the antibody formats discussed herein, as may be variants of them. TABLE 8 provides examples of further preferred VHH domains specific for IL-2Rβ polypeptide and CDR sets from them that may be employed in any of the antibody formats discussed herein, as may be variants of them. TABLE 9 provides examples of further preferred VHH domains specific for γc polypeptide and CDR sets from them that may be employed in any of the antibody formats discussed herein, as may be variants of them.

[0117] Hence, the present invention provides an antibody comprising any of those VHH domains. It also provides an antibody comprising any of those CDR sets. Also provided is an antibody comprising a variant of those. In one embodiment, an antibody is provided comprising one or at least one of those VHH domains/CDR sets/or variants thereof, in another an antibody comprising at least three of those. In a particularly preferred embodiment, an antibody comprising three of those VHH domains/CDR sets/or variants thereof is provided.

[0118] TABLE 5 provides examples of particularly preferred multi-specific antibodies and those form preferred embodiments of the invention, as do variants of them.

### Further Examples of Preferred Binding Molecules

[0119] In one preferred embodiment, a binding molecule of the present invention consists of, or comprises, a VHH domain against IL-2Rα selected from the group consisting of that of SEQ ID NOs: 2, 3, 4, 8 and 10. In one embodiment, rather than comprising the whole VHH, a binding molecule of the invention comprises a set of CDR1, CDR2, and CDR3 from one of those VHHs. In one embodiment, the employed sequence is a variant of any of those sequences which is still able to bind IL-2Rα.

[0120] In one preferred embodiment, a binding molecule of the present invention consists of, or comprises, a VHH domain against IL-2Rβ selected from the group consisting of that of SEQ ID NOs: 16, 18, 19, 22 and 26. In one embodiment, rather than comprising the whole VHH, a binding molecule of the invention comprises a set of CDR1, CDR2, and CDR3 from one of those VHHs. In one embodiment, the employed sequence is a variant of any of those sequences which is still able to bind IL-2Rβ.

[0121] In one preferred embodiment, a binding molecule of the present invention consists of, or comprises, a VHH domain against γc selected from the group consisting of that of SEQ ID NOs: 27, 31, 32, 35 and 36. In one embodiment, rather than comprising the whole VHH, a binding molecule of the invention comprises a set of CDR1, CDR2, and CDR3 from one of those VHHs. In one embodiment, the employed sequence is a variant of any of those sequences which is still able to bind γc.

[0122] In one particularly preferred embodiment, a binding molecule of the present invention comprises the three VHH domains of SEQ IDs 2, 19, and 27. In another preferred embodiment, the binding molecule comprises the CDRs sets of each of SEQ IDs 2, 19, and 27. In one preferred embodiment, the binding molecule has the structure a2/g27-b19 where a2, g27, and b19 represent respectively SEQ ID NOs 2, 27 and 19. In other embodiments, the antibody has the structure g27/a2-b19. In another embodiment, it has the structure g27/b19-a2. In another embodiment, it has the structure b19/a2-g27. In another embodiment, it has the structure b19/g27-a2. Variants of such sequences may also be employed. For example,

[0123] In one preferred embodiment, a binding domain of the present invention comprises the three VHH domains of SEQ IDs 3, 22, and 36. In another preferred embodiment, the binding molecule comprises the CDRs sets of each of SEQ IDs 3, 22, and 36. In one preferred embodiment, the binding molecule has the structure a3/g36-b22 where a3, g36, and b22 represent respectively SEQ ID NOs 3, 36 and 22. In other embodiments, the antibody has the structure g36/a3-b22. In another embodiment, it has the structure g36/b22-a3. In another embodiment, it has the structure b22/a3-g36. In another embodiment, it has the structure b22/g36-a3. Variants of such sequences may also be employed.

[0124] In one preferred embodiment, a binding domain of the present invention comprises the three VHH domains of SEQ IDs 4, 16, and 36. In another preferred embodiment, the binding molecule comprises the CDRs sets of each of SEQ IDs 4, 16, and 36. In one preferred embodiment, the binding molecule has the structure a4/g36-b16 where a4, g36, and b16 represent respectively SEQ ID NOs 4, 36 and 16. In other embodiments, the antibody has the structure g36/a4-b16. In another embodiment, it has the structure g36/b16-a4. In another embodiment, it has the structure b16/a4-g36. In another embodiment, it has the structure b16/g36-a4. Variants of such sequences may also be employed.

[0125] In one preferred embodiment, a binding domain of the present invention comprises the three VHH domains of SEQ IDs 3, 18, and 27. In another preferred embodiment, the binding molecule comprises the CDRs sets of each of SEQ IDs 3, 18, and 27. In one preferred embodiment, the binding molecule has the structure a3/g27-b18 where a3, g27, and b18 represent respectively SEQ ID NOs 3, 27, and 18. In other embodiments, the antibody has the structure g27/a3-b18. In another embodiment, it has the structure g27/b18-a3. In another embodiment, it has the structure b18/a3-g27. In another embodiment, it has the structure b18/g27-a3. Variants of such sequences may also be employed.

[0126] In one embodiment, a binding molecule of the present invention comprises one of the SEQ ID Nos set out in TABLE 5. In one embodiment the binding molecule comprises the VHH sequences of SEQ ID Nos: 32 and 16. In another, those of SEQ ID NOs: 35 and 16. In another, those of SEQ ID NOs: 36 and 16. In another, those of SEQ ID NOs: 27 and 18. In another, those of SEQ ID NOs: 31 and 18. In another, those of SEQ ID NOs: 32 and 18. In another, those of SEQ ID NOs: 35 and 18. In an alternative embodiment, rather than comprise those VHHs it may comprise the two CDR sets from them. It may also be a variant of such sequences. In one embodiment, the binding molecule may also comprise one of SEQ ID NOs 1 to 38 which is not those mentioned above as an additional VHH or it may comprise a CDR set from such VHH.

[0127] In one embodiment, a binding molecule of the present invention employs one of the VHHs or combination of VHHs employed in the Examples of this application. In another embodiment, it employs a CDR set or sets from those employed in the Examples of this application. Any of the other features set out in here may also be employed in addition to the VHHs employed in the Examples.

[0128] FIG. 12A and FIG. 12B provide examples of preferred formats for a trispecific antibodies which each bind all three IL-2R chains and those formats are discussed further below in the following number preferred embodiments where “a” denotes a binding domain with specificity of the IL-2a, “b” for the IL-2Rβ, and “g” for the γc, “/” denotes the swap over from one polypeptide to the next, “-” denotes the binding domains being joined by a linker or simply joined, “cterm” denotes the presence of binding domains at the C terminus of the constant region, and each polypeptide comprises one of the two polypeptide sequences so the polypeptides can associate to form an Fc region, so typically CH2CH3. For each of the further embodiments set out below, preferably, the antibody has the LALA mutations, N297A mutation, and/or the cFAE mutations in the Fc region. More preferably the antibody has all of the LALA mutations, PG mutation, and the cFAE mutations. In another embodiment, the binding molecule has the LALA mutations, PG mutation, and knob-in-hole modifications (such as any set out herein). The further numbered embodiments of trispecific antibodies binding all three IL-2R polypeptide chains being:
[0129] 1. A trispecific antibody having the format a/g-b, which comprises an Fc region. Preferably, where the antibody has the structure of structure 1 in FIG. 12A.
[0130] 2. A trispecific antibody having the format a/b-g, which comprises an Fc region.
[0131] Preferably, where the antibody has the structure of structure 2 in FIG. 12A.
[0132] 3. A trispecific antibody having the format a-a/g-b, which comprises an Fc region. Preferably, where the antibody has the structure of structure 3 in FIG. 12A.
[0133] 4. A trispecific antibody having the format a-a/b-g, which comprises an Fc region. Preferably, where the antibody has the structure of structure 4 in FIG. 12A.
[0134] 5. A trispecific antibody having the format a/a-b-g, which comprises an Fc region. Preferably, where the antibody has the structure of structure 5 in FIG. 12A.
[0135] 6. A trispecific antibody having the format a-b-g/a-b-g, which comprises an Fc region. Preferably, where the antibody has the structure of structure 6 in FIG. 12B.
[0136] 7. A trispecific antibody having the format a-g-b/a-g-b, which comprises an Fc region. Preferably, where the antibody has the structure of structure 7 in FIG. 12B.
[0137] 8. A trispecific antibody having the format b-a-g/b-a-g, which comprises an Fc region. Preferably, where the antibody has the structure of structure 8 in FIG. 12B.
[0138] 9. A trispecific antibody having the format b-g-a/b-g-a, which comprises an Fc region. Preferably, where the antibody has the structure of structure 9 in FIG. 12B.
[0139] 10. A trispecific antibody having the format g-b-a/g-b-a, which comprises an Fc region. Preferably, where the antibody has the structure of structure 10 in FIG. 12B.
[0140] 11. A trispecific antibody having the format g-a-b/g-a-b, which comprises an Fc region. Preferably, where the antibody has the structure of structure 11 in FIG. 12B.
[0141] 12. A trispecific antibody having the format b-a/g-a, which comprises an Fc region. Preferably, where the antibody has the structure of structure 12 in FIG. 12B.
[0142] 13. A trispecific antibody having the format a-b/g-a, which comprises an Fc region. Preferably, where the antibody has the structure of structure 13 in FIG. 12B.
[0143] 14. A trispecific antibody having the format b-a/a-g, which comprises an Fc region. Preferably, where the antibody has the structure of structure 14 in FIG. 12B.
[0144] 15. A trispecific antibody having the format a-b/a-g, which comprises an Fc region. Preferably, where the antibody has the structure of structure 15 in FIG. 12B.
[0145] 16. A trispecific antibody having the format g-b-cterm-a/g-b-cterm-a, which comprises an Fc region. Preferably, where the antibody has the structure of structure 16 in FIG. 12B.
[0146] 17. An antibody having one of the formats shown in FIG. 12C. Preferably, wherein the antibody has one of the structures shown in FIG. 12C with optionally Fc mutations also present.

[0147] In one embodiment any of the formats discussed above in further embodiments 1 to 17 are provided comprising one of the specific VHH domains against IL-2Rα described herein. In one embodiment, all of the VHH domains against IL-2Rα present are that specific VHH domain. In one embodiment any of the formats discussed above in further embodiments 1 to 17 are provided comprising one of the specific VHH domains against IL-2Rβ described herein. In one embodiment, all of the VHH domains against IL-2Rβ present are that specific VHH domain. In one embodiment any of the formats discussed above in further embodiments 1 to 17 are provided comprising one of the specific VHH domains against IL-2Ry described herein. In one embodiment, any of the formats discussed above in further embodiments 1 to 17 are provided comprising a combination of specific VHH domains set out herein, for instance in the sense that all of the VHH domain(s) against IL-2Rα, IL-2Rβ, and ye are those used as a combination of VHH domains set out herein. Also provided are trispecific antibodies of the formats set out in numbered embodiments 1 to 17, where the combination of VHH domains providing specificities for IL-2Rβ, IL-2Rβ, and γc is one of the combinations set out herein, even where set out for an antibody of a different format. In one embodiment a combination of VHH domains or CDR sets used in the Examples of the present application is employed in a format as set out in one of numbered embodiments 1 to 17 set out above.

[0148] FIG. 12C, top Table shows examples of particularly preferred formats. The a, b, and g VHH subunits respectively correspond to those present in the parental tsVHH-48, but in different permutations as depicted in the Table. Hence, the VHH corresponding to VHH “a” is that of SEQ ID NO: 2. The VHH corresponding to VHH “b” is that of SEQ ID NO: 19. The VHH corresponding to VHH “g” is that of SEQ ID NO: 27.

[0149] Hence, in one embodiment the antibody has the format a/b-g. A preferred such antibody is DC00040 or a variant thereof. In another embodiment, the antibody is in the format a/g-b. A preferred such antibody is DC00042 or a variant thereof. In another embodiment, the antibody is in the format a/a-g. A preferred such antibody is DC00094. In another embodiment, the antibody is in the format a/g-a. A preferred such antibody is DC00095. In another embodiment, the antibody is in the format a/a-b-g. A preferred such antibody is DC00043. In another embodiment, the antibody is in the format a/a-g-b. A preferred such antibody is DC00041. In another embodiment, the antibody is in the format a/b-a-g. A preferred such antibody is DC00039. In another embodiment, the antibody is in the format a/g-b-a. A preferred such antibody is DC00044. In another embodiment, the antibody is in the format a/g-a-b. A preferred such antibody is DC00045.

[0150] In another embodiment, the antibody is in the format a-a/b-g. A preferred such antibody is DC00047. In another embodiment, the antibody is in the format a-a/g-b. A preferred such antibody is DC00049. In another embodiment, the antibody is in the format a-a/a-g. A preferred such antibody is DC00096. In another embodiment, the antibody is in the format a-a/g-a. A preferred such antibody is DC00097. In another embodiment, the antibody is in the format a-a/a-b-g. A preferred such antibody is DC00050. In another embodiment, the antibody is in the format a-a/a-g-b. A preferred such antibody is DC00048. In another embodiment, the antibody is in the format a-a/b-a-g. A preferred such antibody is DC00046. In another embodiment, the antibody is in the format a-a/g-b-a. A preferred such antibody is DC00051. In another embodiment, the antibody is in the format a-a/g-a-b. A preferred such antibody is DC00052.

[0151] In another embodiment, the antibody is in the format a-b/b-g. A preferred such antibody is DC00054. In another embodiment, the antibody is in the format a-b/g-b. A preferred such antibody is DC00056. In another embodiment, the antibody is in the format a-b/a-g. A preferred such antibody is DC00060. In another embodiment, the antibody is in the format a-b/g-a. A preferred such antibody is DC00061. In another embodiment, the antibody is in the format a-b/a-b-g. A preferred such antibody is DC00057. In another embodiment, the antibody is in the format a-b/a-g-b. A preferred such antibody is DC00055. In another embodiment, the antibody is in the format a-b/b-a-g. A preferred such antibody is DC00053. In another embodiment, the antibody is in the format a-b/g-b-a. A preferred such antibody is DC00058. In another embodiment, the antibody is in the format a-b/g-a-b. A preferred such antibody is DC00059.

[0152] In another embodiment, the antibody is in the format b-a/b-g. A preferred such antibody is DC00063. In another embodiment, the antibody is in the format b-a/g-b. A preferred such antibody is DC00065. In another embodiment, the antibody is in the format b-a/a-g. A preferred such antibody is DC00069. In another embodiment, the antibody is in the format b-a/g-a. A preferred such antibody is DC00070. In another embodiment, the antibody is in the format b-a/a-b-g. A preferred such antibody is DC00066. In another embodiment, the antibody is in the format b-a/a-g-b. A preferred such antibody is DC00064. In another embodiment, the antibody is in the format b-a/b-a-g. A preferred such antibody is DC00062. In another embodiment, the antibody is in the format b-a/g-b-a. A preferred such antibody is DC00067. In another embodiment, the antibody is in the format b-a/g-a-b. A preferred such antibody is DC00068.

[0153] FIG. 12C, bottom Table shows further examples of particularly preferred formats, with the formats depicted being biparatopic with respect to IL-2Rα. One of the VHHs against IL-2Rα is that from tsVHH-48 so that of SEQ ID NO: 2, with the top of the Table showing the polypeptides including that VHH. The other polypeptide making up the overall antibody is shown on the left hand side, with it being that of SEQ ID NO: 4. SEQ ID NO: 9, SEQ ID NO: 10, or SEQ ID NO: 13. Hence preferred binding molecules include a binding molecule with a geometry set out in the bottom Table with the VHH domains indicated. Thus a preferred binding molecule is one with the VHH domains and geometry of one of DC00082, DC00081, DC00080, DC00083, DC00084. Further preferred binding molecules include one with the VHH domains and geometry of one of DC00087, DC00086, DC00085, DC00088, or DC00089. Further preferred binding molecules include one with the VHH domains and geometry of one of DC00077, DC00076, DC00075, DC00078, or DC00079. Further preferred binding molecules include one with the VHH domains and geometry of one of DC00092, DC00091, DC00090, DC00093, or DC00098.

[0154] The present invention further provides variants of the binding molecules discussed above for FIG. 12C provided that the variants remain functional.

[0155] Further preferred embodiments include the following:
[0156] 1. A binding molecule comprising a polypeptide comprising an amino acid sequence selected from SEQ ID NO: 2043, 2045, 2039, 2047, 2044, 2041, 2048, 2049 and a variant of any thereof which still retains the ability to bind to the relevant IL-2 α, β or γc chain or chains.
[0157] 2. A binding molecule comprising: (i) a polypeptide comprising an amino acid sequence selected from SEQ ID NO: 2052 and a variant of any thereof which still retains the ability to bind to IL-2 a chain; and (ii) a polypeptide comprising an amino acid sequence selected from SEQ ID NO: 243, 2045, 2039, 2047, 2044, 2041, 2048, 2049 and a variant of any thereof which still retains the ability to bind to the relevant IL-2 α, β or γc chain or chains.
[0158] 3. A binding molecule comprising: (i) a polypeptide comprising an amino acid sequence selected from SEQ ID NO: 2046 and a variant of any thereof which still retains the ability to bind to IL-2 a chain; and (ii) a polypeptide comprising an amino acid sequence selected from SEQ ID NO: 243, 2045, 2039, 2047, 2044, 2041, 2048, 2049 or a variant of any thereof which still retains the ability to bind to the relevant IL-2 α, β or γc chain or chains.
[0159] 4. A binding molecule comprising: (i) a polypeptide comprising an amino acid sequence selected from SEQ ID NO: 2050 and a variant of any thereof which still retains the ability to bind to IL-2 a chain; and (ii) a polypeptide comprising an amino acid sequence selected from SEQ ID NO: 243, 2045, 2039, 2047, 2044, 2041, 2048, 2049 and a variant of any thereof which still retains the ability to bind to the relevant IL-2 α, β or γc chain or chains.
[0160] 5. A binding molecule comprising: (i) a polypeptide comprising an amino acid sequence selected from SEQ ID NO: 2051 and a variant of any thereof which still retains the ability to bind to IL-2 a chain; and (ii) a polypeptide comprising an amino acid sequence selected from SEQ ID NO: 243, 2045, 2039, 2047, 2044, 2041, 2048, 2049 and a variant of any thereof which still retains the ability to bind to the relevant IL-2 α, β or γc chain or chains.
[0161] 6. A binding molecule comprising (i) a polypeptide comprising an amino acid sequence selected from SEQ ID NO: 2052, 2046, 2050, 2051, and a variant of any thereof which still retains the ability to bind to IL-2 a chain; and (ii) a polypeptide comprising an amino acid sequence selected from SEQ ID NO: 243 and a variant of any thereof which still retains the ability to bind to the relevant IL-2 a, B or Yc chain or chains.
[0162] 7. A binding molecule comprising: (i) a polypeptide comprising an amino acid sequence selected from SEQ ID NO: 2052, 2046, 2050, 2051 and a variant of any thereof which still retains the ability to bind to IL-2 a chain; and (ii) a polypeptide comprising an amino acid sequence selected from SEQ ID NO: 2045 and a variant of any thereof which still retains the ability to bind to the relevant IL-2 α, β or γc chain or chains.
[0163] 8. A binding molecule comprising: (i) a polypeptide comprising an amino acid sequence selected from SEQ ID NO: 2052, 2046, 2050, 2051 and a variant of any thereof which still retains the ability to bind to IL-2 a chain; and (ii) a polypeptide comprising an amino acid sequence selected from SEQ ID NO: 2042 and a variant of any thereof which still retains the ability to bind to the relevant IL-2 α, β or γc chain or chains.
[0164] 9. A binding molecule comprising: (i) a polypeptide comprising an amino acid sequence selected from SEQ ID NO: 2052, 2046, 2050, 2051 and a variant of any thereof which still retains the ability to bind to IL-2 a chain; and (ii) a polypeptide comprising an amino acid sequence selected from SEQ ID NO: 2039 and a variant of any thereof which still retains the ability to bind to the relevant IL-2 α, β or γc chain or chains.
[0165] 10. A binding molecule comprising: (i) a polypeptide comprising an amino acid sequence selected from SEQ ID NO: 2052, 2046, 2050, 2051 and a variant of any thereof which still retains the ability to bind to IL-2 a chain; and (ii) a polypeptide comprising an amino acid sequence selected from SEQ ID NO: 2047 and a variant of any thereof which still retains the ability to bind to the relevant IL-2 α, β or γc chain or chains.
[0166] 11. A binding molecule comprising: (i) a polypeptide comprising an amino acid sequence selected from SEQ ID NO: 2052, 2046, 2050, 2051 and a variant of any thereof which still retains the ability to bind to IL-2 a chain; and (ii) a polypeptide comprising an amino acid sequence selected from SEQ ID NO: 2044 and a variant of any thereof which still retains the ability to bind to the relevant IL-2 α, β or γc chain or chains.
[0167] 12. A binding molecule comprising: (i) a polypeptide comprising an amino acid sequence selected from SEQ ID NO: 2052, 2046, 2050, 2051 and a variant of any thereof which still retains the ability to bind to IL-2 a chain; and (ii) a polypeptide comprising an amino acid sequence selected from SEQ ID NO: 2048, and a variant of any thereof which still retains the ability to bind to the relevant IL-2 α, β or γc chain or chains.
[0168] 13. A binding molecule comprising: (i) a polypeptide comprising an amino acid sequence selected from SEQ ID NO: 2052, 2046, 2050, 2051 and a variant of any thereof which still retains the ability to bind to IL-2 α chain; and (ii) a polypeptide comprising an amino acid sequence selected from SEQ ID NO: 2041 and a variant of any thereof which still retains the ability to bind to the relevant IL-2 α, β or γc chain or chains.
[0169] 14. A binding molecule comprising: (i) a polypeptide comprising an amino acid sequence selected from SEQ ID NO: 2052, 2046, 2050, 2051 and a variant of any thereof which still retains the ability to bind to IL-2 α chain; and (ii) a polypeptide comprising an amino acid sequence selected from SEQ ID NO: 2048 and a variant of any thereof which still retains the ability to bind to the relevant IL-2 α, β or γc chain or chains.
[0170] 15. A binding molecule comprising: (i) a polypeptide comprising an amino acid sequence selected from SEQ ID NO: 2052, 2046, 2050, 2051 and a variant of any thereof which still retains the ability to bind to IL-2 α chain; and (ii) a polypeptide comprising an amino acid sequence selected from SEQ ID NO: 2049 and a variant of any thereof which still retains the ability to bind to the relevant IL-2 α, β or γc chain or chains.
[0171] 16. A binding molecule comprising a polypeptide comprising an amino acid sequence selected from SEQ ID NO: 2052, 2046, 2050, 2051, and a variant of any thereof which still retains the ability to bind to the relevant IL-2 α, β or γc chain or chains.

[0172] The following represent further preferred embodiments:
[0173] (a) A binding molecule comprising a polypeptide comprising an amino acid sequence selected from SEQ ID NO: 2054, 2055, 2053, 2056, and a variant of any thereof which still retains the ability to bind IL-2 α.
[0174] (b) A binding molecule comprising a polypeptide comprising an amino acid sequence selected from SEQ ID NO: 2047, 2044, 2041, 2048, 2049, and a variant of any thereof which still retains the ability to bind IL-2 α, β or γc chain or chains.
[0175] (c) A binding molecule binding molecule comprising: (i) a polypeptide comprising an amino acid sequence selected from SEQ ID NO: 2054, 2055, 2053, 2056, and a variant of any thereof which still retains the ability to bind to the IL-2 α chain; and (ii) a polypeptide comprising an amino acid sequence selected from SEQ ID NO: 2047, and a variant of any thereof which still retains the ability to bind to the relevant IL-2 α, β or γc chain or chains.
[0176] (d) A binding molecule binding molecule comprising: (i) a polypeptide comprising an amino acid sequence selected from SEQ ID NO: 2054, 2055, 2053, 2056, and a variant of any thereof which still retains the ability to bind to the IL-2 α chain; and (ii) a polypeptide comprising an amino acid sequence selected from SEQ ID NO: 2044, and a variant of any thereof which still retains the ability to bind to the relevant IL-2 α, B or Yc chain or chains.
[0177] (e) A binding molecule binding molecule comprising: (i) a polypeptide comprising an amino acid sequence selected from SEQ ID NO: 2054, 2055, 2053, 2056, and a variant of any thereof which still retains the ability to bind to the IL-2 α chain; and (ii) a polypeptide comprising an amino acid sequence selected from SEQ ID NO: 2041, and a variant of any thereof which still retains the ability to bind to the relevant IL-2 α, β or γc chain or chains.
[0178] (f) A binding molecule binding molecule comprising: (i) a polypeptide comprising an amino acid sequence selected from SEQ ID NO: 2054, 2055, 2053, 2056, and a variant of any thereof which still retains the ability to bind to the IL-2 α chain; and (ii) a polypeptide comprising an amino acid sequence selected from SEQ ID NO: 2048, and a variant of any thereof which still retains the ability to bind to the relevant IL-2 α, β or γc chain or chains.
[0179] (g) A binding molecule binding molecule comprising: (i) a polypeptide comprising an amino acid sequence selected from SEQ ID NO: 2054, 2055, 2053, 2056, and a variant of any thereof which still retains the ability to bind to the IL-2 α chain; and (ii) a polypeptide comprising an amino acid sequence selected from SEQ ID NO: 2049, and a variant of any thereof which still retains the ability to bind to the relevant IL-2 α, β or γc chain or chains.
[0180] (h) A binding molecule binding molecule comprising: (i) a polypeptide comprising an amino acid sequence selected from SEQ ID NO: 2054, and a variant of any thereof which still retains the ability to bind to the IL-2 α chain; and (ii) a polypeptide comprising an amino acid sequence selected from SEQ ID NO: 2047, 2044, 2041, 2048, 2049, and a variant of any thereof which still retains the ability to bind to the relevant IL-2 α, β or γc chain or chains.
[0181] (i) A binding molecule binding molecule comprising: (i) a polypeptide comprising an amino acid sequence selected from SEQ ID NO: 2055, and a variant of any thereof which still retains the ability to bind to the IL-2 α chain; and (ii) a polypeptide comprising an amino acid sequence selected from SEQ ID NO: 2047, 2044, 2041, 2048, 2049, and a variant of any thereof which still retains the ability to bind to the relevant IL-2 α, β or γc chain or chains.
[0182] (j) A binding molecule binding molecule comprising: (i) a polypeptide comprising an amino acid sequence selected from SEQ ID NO: 2053, and a variant of any thereof which still retains the ability to bind to the IL-2 α chain; and (ii) a polypeptide comprising an amino acid sequence selected from SEQ ID NO: 2047, 2044, 2041, 2048, 2049, and a variant of any thereof which still retains the ability to bind to the relevant IL-2 α, β or γc chain or chains.
[0183] (k) A binding molecule binding molecule comprising: (i) a polypeptide comprising an amino acid sequence selected from SEQ ID NO: 2056, and a variant of any thereof which still retains the ability to bind to the IL-2 α chain; and (ii) a polypeptide comprising an amino acid sequence selected from SEQ ID NO: 2047, 2044, 2041, 2048, 2049, and a variant of any thereof which still retains the ability to bind to the relevant IL-2 α, β or γc chain or chains.

[0184] Examples of other preferred embodiments include the following pairwise combinations of polypeptides: (1) SEQ ID NO 2052 and SEQ ID NO: 2043; (2) SEQ ID NO 2052 and SEQ ID NO: 2045; (3) SEQ ID NO 2052 and SEQ ID NO: 2042; (4) SEQ ID NO 2052 and SEQ ID NO: 2039; (5) SEQ ID NO 2052 and SEQ ID NO: 2047; (6) SEQ ID NO 2052 and SEQ ID NO: 2044; (7) SEQ ID NO 2052 and SEQ ID NO: 2041; (8) SEQ ID NO 2052 and SEQ ID NO: 2048; SEQ ID NO 2052 and SEQ ID NO: 2049; (10) a variant of any of (1) to (9).

[0185] Examples of other preferred embodiments include the following pairwise combinations of polypeptides: (1) SEQ ID NO 2046 and SEQ ID NO: 2043; (2) SEQ ID NO 2046 and SEQ ID NO: 2045; (3) SEQ ID NO 2046 and SEQ ID NO: 2042; (4) SEQ ID NO 2046 and SEQ ID NO: 2039; (5) SEQ ID NO 2046 and SEQ ID NO: 2047; (6) SEQ ID NO 2046 and SEQ ID NO: 2044; (7) SEQ ID NO 2046 and SEQ ID NO: 2041; (8) SEQ ID NO 2046 and SEQ ID NO: 2048; SEQ ID NO 2046 and SEQ ID NO: 2049; (10) a variant of any of (1) to (9).

[0186] Examples of other preferred embodiments include the following pairwise combinations of polypeptides: (1) SEQ ID NO 2050 and SEQ ID NO: 2043; (2) SEQ ID NO 2050 and SEQ ID NO: 2045; (3) SEQ ID NO 2050 and SEQ ID NO: 2042; (4) SEQ ID NO 2050 and SEQ ID NO: 2039; (5) SEQ ID NO 2050 and SEQ ID NO: 2047; (6) SEQ ID NO 2050 and SEQ ID NO: 2044; (7) SEQ ID NO 2050 and SEQ ID NO: 2041; (8) SEQ ID NO 2050 and SEQ ID NO: 2048; SEQ ID NO 2050 and SEQ ID NO: 2049; (10) a variant of any of (1) to (9).

[0187] Examples of other preferred embodiments include the following pairwise combinations of polypeptides: (1) SEQ ID NO 2051 and SEQ ID NO: 2043; (2) SEQ ID NO 2051 and SEQ ID NO: 2045; (3) SEQ ID NO 2051 and SEQ ID NO: 2042; (4) SEQ ID NO 2051 and SEQ ID NO: 2039; (5) SEQ ID NO 2051 and SEQ ID NO: 2047; (6) SEQ ID NO 2051 and SEQ ID NO: 2044; (7) SEQ ID NO 2051 and SEQ ID NO: 2041; (8) SEQ ID NO 2051 and SEQ ID NO: 2048; SEQ ID NO 2051 and SEQ ID NO: 2049; (10) a variant of any of (1) to (9).

[0188] Examples of other preferred embodiments include the following pairwise combinations of polypeptides: (1) SEQ ID NO 2054 and SEQ ID NO: 2047; (2) SEQ ID NO 2054 and SEQ ID NO: 2044; (3) SEQ ID NO 2054 and SEQ ID NO: 2041; (4) SEQ ID NO 2054 and SEQ ID NO: 2048; (5) SEQ ID NO 2054 and SEQ ID NO: 2049; (6) a variant of any of (1) to (3).

[0189] Examples of other preferred embodiments include the following pairwise combinations of polypeptides: (1) SEQ ID NO 2055 and SEQ ID NO: 2047; (2) SEQ ID NO 2055 and SEQ ID NO: 2044; (3) SEQ ID NO 2055 and SEQ ID NO: 2041; (4) SEQ ID NO 2055 and SEQ ID NO: 2048; (5) SEQ ID NO 2055 and SEQ ID NO: 2049; (6) a variant of any of (1) to (5).

[0190] Examples of other preferred embodiments include the following pairwise combinations of polypeptides: (1) SEQ ID NO 2053 and SEQ ID NO: 2047; (2) SEQ ID NO 2053 and SEQ ID NO: 2044; (3) SEQ ID NO 2053 and SEQ ID NO: 2041; (4) SEQ ID NO 2053 and SEQ ID NO: 2048; (5) SEQ ID NO 2053 and SEQ ID NO: 2049; (6) a variant of any of (1) to (5).

[0191] Examples of other preferred embodiments include the following pairwise combinations of polypeptides: (1) SEQ ID NO 2056 and SEQ ID NO: 2047; (2) SEQ ID NO 2056 and SEQ ID NO: 2044; (3) SEQ ID NO 2056 and SEQ ID NO: 2041; (4) SEQ ID NO 2056 and SEQ ID NO: 2048; (5) SEQ ID NO 2056 and SEQ ID NO: 2049; (6) a variant of any of (1) to (5).

[0192] In a further preferred embodiment, a binding molecule of the present invention comprises the CDR sets or variant versions thereof or the tsVHH-48 antibody shown in FIG. 12C. In another embodiment, it comprises the VHH domains of the tsVHH-48 antibody or variant versions thereof. In one embodiment, a binding molecule comprises a polypeptide which is monovalent selected from SEQ ID NOs: 2052, 2053, 2054, 2055 or 2056, or a variant thereof. In another embodiment, a binding molecule comprises a polypeptide comprising the sequence of SEQ ID NO: 2028 or a variant thereof. In another embodiment, a binding molecule comprise: (i) a polypeptide comprising the sequence of any one of SEQ ID NOs: 2052, 2053, 2054, 2055 or a variant thereof; and (ii) a polypeptide comprising the sequence of SEQ ID NO: 2028 or a variant thereof. For example, a binding molecule may comprise (i) a polypeptide comprising the sequence of SEQ ID NO: 2052 or a variant thereof; and (ii) a polypeptide comprising the sequence of SEQ ID NO: 2028 or a variant thereof. For example, a binding molecule may comprise: (i) a polypeptide comprising the sequence of SEQ ID NO: 2053 or a variant thereof; and (ii) a polypeptide comprising the sequence of SEQ ID NO: 2028 or a variant thereof. For example, a binding molecule may (i) a polypeptide comprising the sequence of SEQ ID NO: 2054 or a variant thereof; and (ii) a polypeptide comprising the sequence of SEQ ID NO: 2028 or a variant thereof. For example, a binding molecule may (i) a polypeptide comprising the sequence of SEQ ID NO: 2055 or a variant thereof; and (ii) a polypeptide comprising the sequence of SEQ ID NO: 2028 or a variant thereof. Also provided are binding molecules comprising the CDRs sets or variant versions thereof of such binding molecules. Also provided are binding molecules comprising the VHH domains or variant versions thereof of such binding molecules.

[0193] In a particularly preferred embodiment, the binding molecules set out are tri-specific. In one embodiment, a variant comprises the VHH regions set out herein, but the other sequences may be different. In another embodiment, a variant sequence will have the CDRs of a binding molecule set out herein, but the other sequences may vary. In one embodiment, the CDRs may have from 1 to 10 amino acid modifications in total, provided that the binding molecule retains functionality. In one embodiment, the modifications will be conservative amino acid modifications. Variants are explained in more detail elsewhere herein and any such degree or type of variation may apply to the specific binding molecules set out herein.

[0194] Also provided are binding molecules which are humanised versions of any of those set out herein. Further provided are binding molecules which have the same, or variant versions, of the CDRs for one of the binding molecules set out herein and in the same format, but the non-CDR sequences are different. Also provided are binding molecules with the same VHHs as a binding molecule set out herein, or variant VHH sequences, where the binding molecule is in the same format, but the non-VHH sequences are different. For any of the specific binding molecules set out herein variant versions are also provided where the constant region modifications and mutations are rather those present others set out herein.

[0195] The present invention also provides a trispecific binding molecule of the present invention wherein the binding molecule is an antibody comprising two heavy chains wherein the antibody has four antigen-binding regions. In one embodiment, the antibody has four antigen-binding regions, with two antigen-binding regions on each heavy chain polypeptide. In another embodiment, the antibody has four antigen binding sites, with one antigen-binding region on one heavy chain polypeptide and three antigen-binding regions on the other heavy chain polypeptide.

[0196] In one embodiment, an antibody of the present invention has six antigen-binding regions. In one embodiment, the antibody has six antigen-binding regions, with three antigen binding regions present on each heavy chain polypeptide. In another embodiment the antibody is symmetrical in the sense that each of the two heavy chain polypeptides is the same.

[0197] In one preferred embodiment, an antibody of the present invention is symmetrical in the sense that each of the two heavy chain polypeptides is the same, with each heavy chain comprising two antigen binding regions. In one embodiment, the antibody is symmetrical in the sense that each of the two heavy chain polypeptides is the same, with each heavy chain comprising three antigen binding regions. In another embodiment, the antibody comprises two different single domain binding regions that each bind a different epitope of the same IL-2R chain polypeptide.

[0198] In one particularly preferred embodiment, a binding molecule, particularly an antibody, does not comprise an antibody light chain. In another preferred embodiment, a binding molecule, particularly an antibody, of the present invention does not comprise a Fab region.

[0199] In one embodiment, a binding molecule of the present invention may be at least as good or improved for a particular parameter in comparison to IL-2. For instance, in one embodiment, the fold EC50 NK/Treg value of a binding molecule of the present invention may be at least as good or better than the value for IL-2. In another embodiment the fold maximal percent pSTAT5 signalling Treg/NK may be at least as good or better as for IL-2. In one preferred embodiment, the method used to measure such values is that employed in the Examples of the present application.

### Variant, Cross-Blocking, and Competing Antibodies

[0200] Also provided are variant binding molecules, in particular antibodies, derived from the specific molecules set out herein. Further provided, are binding molecules, in particular antibodies, that are able to cross-block the specific binding molecules set herein. Further provided are binding molecules, in particular antibodies, that are able to compete for binding with the specific molecules set out herein. In embodiments where an antibody of the present invention is a multi-specific antibody, it may be that just one antigen-binding specificity is defined in terms of being a variant of one of the specific antigen-binding sites set out herein, or able to compete, or cross-block with one of the specific antigen-binding sites set out here. As in a preferred embodiment the antigen-binding sites of an antibody of the present invention are based on VHH sequences, the individual VHH sequences set out herein may be used to define other VHH sequences that are able to compete or cross-block the specific VHH molecules set out herein.

[0201] Cross-blocking binding molecules, in particular antibodies, can be identified using any suitable method in the art, for example by using competition ELISA or BIAcore assays where binding of the cross-blocking binding molecule to antigen prevents the binding of a binding molecule of the present invention or vice versa. Such cross-blocking assays may use cells expressing IL-2R as a target. In one embodiment, flow cytometry is used to assess binding to cells expressing IL-2R. In another embodiment, the ability to compete or cross-block binding to an individual chain of the IL-2R is measured. A technique such as ELISA may be used. A technique such as surface plasmon resonance may be employed. In one embodiment, cross-blocking may be studied for each specificity individually. In one embodiment, that may be done by looking at the ability of individual VHHs to cross-block.

[0202] In one embodiment, the degree of cross-blocking may be, for instance, at least 75%, at least 80% or at least 90%. In another embodiment, it may be at least 95%. In another embodiment, it may be at least 99%. Such levels of cross-blocking may be in relation to the overall molecule.

[0203] Variant binding molecules, and in particular antibodies, may be employed where they still retain the desired properties of binding molecules of the present invention, particularly in relation to binding IL-2R. For instance, a variant binding molecule, in particular a variant antibody, or an antigen binding site of the variant, may be defined in terms of still being able to bind the same IL-2R chain as the original binding molecule, in particular antibody. Hence, binding molecules and antibodies with degrees of sequence identity to specific ones set out herein are also provided. The sequence identity may be over the entire length of a sequence, such as over the entire length of a VHH domain, or just over the CDR sequences. Sequence identity may also be defined in terms of over the entire length of the polypeptide in question. Degrees of identity and similarity can be readily calculated (Computational Molecular Biology, Lesk, A. M., ed., Oxford University Press, New York, 1988; Biocomputing. Informatics and Genome Projects, Smith, D. W., ed., Academic Press, New York, 1993; Computer Analysis of Sequence Data, Part 1, Griffin, A. M., and Griffin, H. G., eds., Humana Press, New Jersey, 1994; Sequence Analysis in Molecular Biology, von Heinje, G., Academic Press, 1987, Sequence Analysis Primer, Gribskov, M. and Devereux, J., eds., M Stockton Press, New York, 1991, the BLAST™ software available from NCBI (Altschul, S. F. et al., 1990, J. Mol. Biol. 215:403-410; Gish, W. & States, D. J. 1993, Nature Genet. 3:266-272. Madden, T. L. et al., 1996, Meth. Enzymol. 266:131-141; Altschul, S. F. et al., 1997, Nucleic Acids Res. 25:3389-3402; Zhang, J. & Madden, T. L. 1997, Genome Res. 7:649-656). The present invention also extends to novel polypeptide sequences disclosed herein and sequences at least 80% similar or identical thereto, for example 85% or greater, 90% or greater, in particular 95%, 96%, 97%, 98% or 99% or greater similarity or identity. In one embodiment a sequence may have at least 99% sequence identity to at least one of the specific sequences provided herein. “Identity”, as used herein, indicates that at any particular position in the aligned sequences, the amino acid residue is identical between the sequences. In one embodiment, similarity or identity is measured in relation to the entire length of the shortest sequence of the two being compared. “Similarity”, as used herein, indicates that, at any particular position in the aligned sequences, the amino acid residue is of a similar type between the sequences. For example, leucine may be substituted for isoleucine or valine. Other amino acids which can often be substituted for one another include but are not limited to:
[0204] phenylalanine, tyrosine and tryptophan (amino acids having aromatic side chains);
[0205] lysine, arginine and histidine (amino acids having basic side chains);
[0206] aspartate and glutamate (amino acids having acidic side chains);
[0207] asparagine and glutamine (amino acids having amide side chains); and
[0208] cysteine and methionine (amino acids having sulphur-containing side chains).

[0209] In one embodiment, a variant may have from one to ten, such as one, two, three, four, five or up to those values of amino acid sequence changes or at least those values, or up to those values, so long as the variant is still able to specifically bind the desired IL-2R chain. In another embodiment, a variant of the present invention may have at least five, six, seven, eight, nine, ten, eleven or twelve amino acid sequence changes compared to the CDRs of one of the specific antibodies set out herein, for example is may have that number of sequence changes in a set of CDRs making up a VHH domain. An antibody of the present invention may have that number of sequence changes in the CDRs compared to the specific antibody set out herein. It may have up to that number of sequence changes. It may have at least that number of amino acid sequence changes. In one embodiment, a variant sequence may have one, two, three, four, five, or more amino acid sequence changes compared to one of the specific binding molecules set out herein. In one embodiment, it may have from five to ten, ten to fifteen, or fifteen to twenty amino acid sequence changes compared to a specific binding molecule set out herein. It may be that a binding molecule has that number of sequence changes in the overall VHH domain. It may have that number of sequence changes overall in the CDRs of a VHH domain. It may have such a number of sequence changes in the individual CDR. Such variant antibody molecules will typically retain the ability to specifically bind IL-2R or in the case of a VHH domain the IL-2R polypeptide it is specific for. They may also retain one of the other functions set out herein. Typically a variant will retain the ability to bind the IL-2R or individual IL-2R polypeptide. It will be appreciated that this aspect of the invention also extends to variants of the specific binding molecules and antibodies, and in particular antibodies, including humanised versions and modified versions, including those in which amino acids have been mutated in the CDRs to remove one or more isomerisation, deamidation, glycosylation site or cysteine residue.

[0210] In one embodiment, the binding molecules, an in particular antibodies, of the present invention are mutated to provide improved affinity for IL-2R polypeptides. Such variants can be obtained by a number of affinity maturation protocols including mutating the CDRs (Yang et al., J. Mol. Biol., 254, 392-403, 1995), chain shuffling (Marks et al., Bio/Technology, 10, 779-783, 1992), use of mutator strains of E. coli (Low et al J. Mol. Biol., 250, 359-368, 1996), DNA shuffling (Patten et al Curr. Opin. Biotechnol., 8, 724-733, 1997), phage display (Thompson et al., J. Mol. Biol., 256, 77-88, 1996), and sexual PCR (Crameri et al Nature, 391, 288-291, 1998). Vaughan et al discusses these methods of affinity maturation (Vaughan et al., Nat. Biotech., 16, 535-539, 1998). Where not specifically for VHH domains such approaches may be adapted for them. Improving the affinity of binding of individual binding sites will typically also improve the overall avidity for the target where the binding molecule has more than one binding site.

[0211] The skilled person may generate antibodies for use in the antibodies of the invention using any suitable method known in the art. Antigen polypeptides, for use in generating antibodies for example for use to immunize a host or for use in panning, such as in phage display, may be prepared by processes well known in the art from genetically engineered host cells comprising expression systems or they may be recovered from natural biological sources. In the present application, the term “polypeptides” includes peptides, polypeptides and proteins. These are used interchangeably unless otherwise specified. The antigen polypeptide may in some instances be part of a larger protein such as a fusion protein for example fused to an affinity tag or similar. In one embodiment, the host may be immunised with a cell expressing an IL-2R or an IL-2R polypeptide. In a particularly preferred embodiment, a VHH domain of the present invention is obtained by immunising a camelid and in particular a llama.

[0212] In one example, the antigen-binding sites, and in particular the variable regions, of the antibodies according to the invention are humanised. Humanised (which include CDR-grafted antibodies) as employed herein refers to molecules having one or more complementarity determining regions (CDRs) from a non-human species and a framework region from a human immunoglobulin molecule (see, e.g., U.S. Pat. No. 5,585,089; WO91/09967 which are incorporated by reference). It will be appreciated that it may only be necessary to transfer the specificity determining residues of the CDRs rather than the entire CDR (see for example, Kashmiri et al., 2005, Methods, 36, 25-34). In a preferred embodiment though, the whole CDR or CDRs is/are transplanted. Humanised antibodies may optionally further comprise one or more framework residues derived from the non-human species from which the CDRs were derived. As used herein, the term “humanised antibody molecule” refers to an antibody molecule wherein one or more CDRs (including, if desired, one or more modified CDRs) from a donor antibody (e.g., a murine monoclonal antibody) are grafted into a framework of an acceptor antibody (e.g., a human antibody). For a review, see Vaughan et al, Nature Biotechnology, 16, 535-539, 1998. In one embodiment, rather than the entire CDR being transferred, only one or more of the specificity determining residues from any one of the CDRs described herein above are transferred to the human antibody framework (see for example, Kashmiri et al., 2005, Methods, 36, 25-34). In one embodiment only the specificity determining residues from one or more of the CDRs described herein above are transferred to the human antibody framework. In another embodiment, only the specificity determining residues from each of the CDRs described herein above are transferred to the human antibody framework.

[0213] When the CDRs or specificity determining residues are grafted, any appropriate acceptor variable region framework sequence may be used having regard to the class/type of the donor antibody from which the CDRs are derived, including mouse, primate and human framework regions. Suitably, the humanised antibody according to the present invention has a variable domain comprising human acceptor framework regions as well as one or more of the CDRs provided herein. Examples of human frameworks which can be used in the present invention are KOL, NEWM, REI, EU, TUR, TEI, LAY and POM. For example, KOL and NEWM can be used for the heavy chain, REI can be used for the light chain and EU, LAY and POM can be used for both the heavy chain and the light chain. Alternatively, human germline sequences may be used; these are available at: http://www2.mrc-lmb.cam.ac.uk/vbase/list2.php.

[0214] In a humanised antibody molecule of the present invention, the acceptor framework does not necessarily need to be derived from the same antibody and may, if desired, comprise composite chains having framework regions derived from different chains. The framework regions need not have exactly the same sequence as those of the acceptor antibody. For instance, unusual residues may be changed to more frequently-occurring residues for that acceptor chain class or type. Alternatively, selected residues in the acceptor framework regions may be changed so that they correspond to the residue found at the same position in the donor antibody (see Reichmann et al 1998, Nature, 332, 323-324). Such changes should be kept to the minimum necessary to recover the affinity of the donor antibody. A protocol for selecting residues in the acceptor framework regions which may need to be changed is set forth in WO 91/09967. Derivatives of frameworks may have 1, 2, 3, 4, 5, 6, 7, 8, 9, 10 or more amino acids replaced with an alternative amino acid, for example with a donor residue. Donor residues are residues from the donor antibody, i.e., the antibody from which the CDRs were originally derived, in particular the residue in a corresponding location from the donor sequence is adopted. Donor residues may be replaced by a suitable residue derived from a human receptor framework (acceptor residues).

[0215] The Kabat et al numbering system is referred to herein. This system is set forth in Kabat et al., 1987, in Sequences of Proteins of Immunological Interest, US Department of Health and Human Services, NIH, USA (hereafter “Kabat et al. (supra)”). This numbering system is used in the present specification except where otherwise indicated. The Kabat residue designations do not always correspond directly with the linear numbering of the amino acid residues. The actual linear amino acid sequence may contain fewer or additional amino acids than in the strict Kabat numbering corresponding to a shortening of, or insertion into, a structural component, whether framework or complementarity determining region (CDR), of the basic variable domain structure. The correct Kabat numbering of residues may be determined for a given antibody by alignment of residues of homology in the sequence of the antibody with a “standard Kabat numbered sequence. The CDRs of the heavy chain variable domain are located at residues 31-35 (CDR-H1), residues 50-65 (CDR-H2) and residues 95-102 (CDR-H3) according to the Kabat numbering system. However, according to Chothia (Chothia, C. and Lesk, A.M. J. Mol. Biol., 196, 901-917 (1987)), the loop equivalent to CDR-H1 extends from residue 26 to residue 32. Thus, unless indicated otherwise “CDR-H1” as employed herein is intended to refer to residues 26 to 35, as described by a combination of the Kabat numbering system and Chothia's topological loop definition. The CDRs of the light chain variable domain are located at residues 24-34 (CDR-L1), residues 50-56 (CDR-L2) and residues 89-97 (CDR-L3) according to the Kabat numbering system.

[0216] The skilled person is able to test variants of CDRs or humanised sequences in any suitable assay such as those described herein to confirm activity is maintained.

[0217] A preferred variant binding molecule will retain the ability to act as a trispecific binding molecule in the sense of binding all three of IL-2 α, β, and γ.

[0218] In one embodiment, variant antibodies may be identified by identifying such antibodies that are able to cross-block specific antibodies set out herein. Cross-blocking binding molecules, in particular antibodies, can be identified using any suitable method in the art, for example by using competition ELISA or BIAcore assays where binding of the cross-blocking antibody to antigen prevents the binding of an antibody of the present invention or vice versa. Such cross-blocking assays may use cells expressing IL-2Rα/IL-2Rβ/γc as a target. In one embodiment, flow cytometry is used to assess binding to cells expressing IL-2Rα/IL-2Rβ/γc.

[0219] Further provided, are binding molecules that bind the same epitope on one of the IL-2R polypeptide chains as one of the specific antibodies set out herein. For instance, the binding molecule may be an antibody that binds to the same epitope. It may be an antibody that belongs to the same “epitope bin” as one of those set out in the Examples of the present application. In one embodiment, the binding molecule may bind to all three of the epitopes recognised in the three IL-2R polypeptide chains.

[0220] In one preferred embodiment, a variant CDR has one of the levels of sequence identity recited herein. In another it has one of the levels of sequence identity. For instance, in one embodiment, a variant binding molecule may have at least 90% sequence identity to all of the relevant CDRs of the binding molecule it is being compared to. In another embodiment, the CDRs have at least 95% sequence identity over the CDRs they are being compared to. In another embodiment a variants may have VHH domains with at least 90% sequence identity to the VHH domains of the specific binding molecule it is being compared to. In another embodiment, the VHH domains have at least 95% sequence identity. In another embodiment, a variant CDR may show one, two, or three amino acid sequence changes compared to the specific CDR. A set of variants may be one where each CDR shows that level of variation compared to the specific sequence CDRs. It may be that level of variation is shown cumulatively over the whole CDRs compared to those of the specific binding molecules. A variant will typically retain functionality compared to the specific binding molecule. For example, a variant will typically still be able to bind all of the IL-2Rα, IL-2Rβ and γc chains.

[0221] For any of the specific CDRs, VHH domains, polypeptides, and binding molecules set out herein, the present invention also provides variant versions as set out herein.

### Conjugates, Fusion Proteins, Effector Molecules, and Labels

[0222] In a preferred embodiment, a binding molecule, particularly an antibody, of the present invention may exert its effect by binding the IL-2R without any need for a further effector molecule or label. In some embodiments though it may be conjugated to an effector molecule or label. Hence, a binding molecule, particularly an antibody, for use in the present invention may be conjugated to one or more effector or label molecule(s). Where it is desired to obtain a binding molecule, particularly an antibody, according to the present invention linked to an effector molecule or label, this may be prepared by standard chemical or recombinant DNA procedures in which the binding molecule is linked either directly or via a coupling agent to the effector molecule. Techniques for conjugating such effector molecules to antibodies are well known in the art (see, Hellstrom et al., Controlled Drug Delivery, 2nd Ed., Robinson et al., eds., 1987, pp. 623-53; Thorpe et al., 1982, Immunol. Rev., 62:119-58 and Dubowchik et al., 1999, Pharmacology and Therapeutics, 83, 67-123). Particular chemical procedures include, for example, those described in WO 93/06231, WO 92/22583, WO 89/00195, WO 89/01476 and WO 03/031581. Alternatively, where the effector or label molecule is a protein or polypeptide the linkage may be achieved using recombinant DNA procedures, for example as described in WO 86/01533 and EP0392745.

[0223] Effector and label molecules which may be employed include, for example, drugs, toxins, biologically active proteins, for example enzymes, antibody or antibody fragments, synthetic or naturally occurring polymers, nucleic acids and fragments thereof, e.g., DNA, RNA, and fragments thereof, radionuclides, particularly radioiodide, radioisotopes, chelated metals, nanoparticles and reporter groups such as fluorescent compounds or compounds which may be detected by NMR or ESR spectroscopy. Antibodies of the present invention may comprise a detectable substance for use as a label. Examples of detectable substances include various enzymes, prosthetic groups, fluorescent materials, luminescent materials, bioluminescent materials, radioactive nuclides, positron emitting metals (for use in positron emission tomography), and nonradioactive paramagnetic metal ions. See generally U.S. Pat. No. 4,741,900 for metal ions which can be conjugated to antibodies for use as diagnostics. Suitable enzymes include horseradish peroxidase, alkaline phosphatase, betagalactosidase, or acetylcholinesterase; suitable prosthetic groups include streptavidin, avidin and biotin; suitable fluorescent materials include umbelliferone, fluorescein, fluorescein isothiocyanate, rhodamine, dichlorotriazinylamine fluorescein, dansyl chloride and phycoerythrin; suitable luminescent materials include luminol; suitable bioluminescent materials include luciferase, luciferin, and aequorin; and suitable radioactive nuclides include ¹²⁵I, ¹³¹I, ¹¹¹In and ⁹⁹Tc.

[0224] In another embodiment, the effector molecule may increase or decrease the half-life of the binding molecule, in particular antibody, in vivo, and/or reduce immunogenicity and/or enhance delivery across an epithelial barrier to the immune system. Examples of suitable effector molecules of this type include polymers, albumin, albumin-binding proteins or albumin-binding compounds such as those described in WO 05/117984. Where the effector molecule is a polymer, it may, in general, be a synthetic or a naturally occurring polymer, for example an optionally substituted straight or branched chain polyalkylene, polyalkenylene or polyoxyalkylene polymer or a branched or unbranched polysaccharide, e.g., a homo-or heteropolysaccharide. Specific optional substituents which may be present on the above-mentioned synthetic polymers include one or more hydroxy, methyl or methoxy groups. Specific examples of synthetic polymers include optionally substituted straight or branched chain poly (ethyleneglycol), poly (propyleneglycol) poly (vinylalcohol) or derivatives thereof, especially optionally substituted poly (ethyleneglycol) such as methoxypoly (ethyleneglycol) or derivatives thereof.

[0225] A binding molecule, particularly an antibody, of the present invention may be conjugated to a molecule that modulates or alters serum half-life. A binding molecule, particularly antibody, of the invention may bind to albumin, for example in order to modulate the serum half-life. Hence, in one embodiment a binding molecule, particularly an antibody, of the present invention includes a binding site for albumin, for instance it may include a VHH domain specific for albumin in addition to the other antigen-binding sites of the antibody. In another embodiment, a binding molecule, particularly an antibody, of the invention may include a peptide linker which is an albumin binding peptide. Examples of albumin binding peptides are included in WO 2015/197772 and WO 2007/106120 the entirety of which are incorporated by reference. In one embodiment, an antibody of the present invention may comprise an Fc tail, serum albumin, and/or a moiety which is a binder of serum albumin, and PEG.

[0226] In another embodiment, a binding molecule, particularly an antibody, of the invention is not conjugated to an effector molecule. In one embodiment, a binding molecule, particularly an antibody, of the invention is not conjugated to a toxin. In another embodiment, a binding molecule, particularly an antibody, of the invention is not conjugated to a radioisotope. In another embodiment, it is not conjugated to an agent for imaging.

### Assays

[0227] In one embodiment, a functional assay may be employed to determine if a binding molecule, particularly an antibody, of the present invention, or an individual component of it, has a particular property or properties, for instance such as any of those mentioned herein. In one embodiment, one or more of the assays described in the Examples of the present application may be employed to assess a particular binding molecule, particularly an antibody, and whether it has a desired property or properties.

[0228] A binding molecule, particularly an antibody molecule, of the present invention is able to bind at least one polypeptide chain of IL-2R, so at least one of IL-2Rα, IL-2Rβ, and the γc polypeptide chains. Preferably, it will be able to bind at least two of those polypeptide chains. Particularly preferably, it will be able to bind all three of the IL-2Rα, IL-2Rβ, and the γc polypeptide chains. The ability of antibody binding molecule, or individual VHH, of the present invention, or a candidate, to bind may be assessed in a variety of ways. For example, in one embodiment the ability to bind a given IL-2R polypeptide chain is assessed by employing the polypeptide, such as by using techniques like surface plasmon resonance using the polypeptide chain, or a portion thereof, bound to a chip. Any suitable method for measuring binding may be employed, such as any of the methods discussed herein. In a particularly preferred embodiment, the ability to bind IL-2Rα, IL-2Rβ, and the γc will be assessed using a cell expressing the high affinity IL-2Rα/IL-2Rβ/γc receptor complex on its surface. In one embodiment, candidate molecules are labelled and then screened for their ability to bind cells expressing the receptor, using techniques such as ELISA or flow cytometry. In another embodiment, candidate molecules may be incubated with cells expressing the receptor and then bound candidate molecules detected using secondary agents such as a labelled antibody specific for the species of the candidate molecules. In one embodiment, an antibody, or VHH domain, of present invention is labelled, for example using luciferase-tagged (e.g., Gaussia princeps luciferase (GpL)) variants of an antibody, an in particular antibody or the fusion proteins, for example as described in Kums et al., MAbs. 2017 April; 9 (3): 506-520). Such tagged antibodies may also be used in competitive binding assays.

[0229] In one embodiment, a binding molecule, particularly an antibody, of the present invention is able to act as an agonist of the IL-2Rα/IL-2Rβ/γc complex. The present invention provides a method comprising: (a) contacting a cell expressing the IL-2Rα/IL-2Rβ/γc complex with the candidate; and (b) measuring STAT5 phosphorylation, where if the candidate triggers STAT5 phosphorylation it is selected. Such methods may further comprise comparison to a positive control known to activate signalling and hence STAT5 phosphorylation. In one embodiment, the positive control is IL-2. In another embodiment, the positive control is one of the specific binding molecules disclosed herein known to activate the receptor. For instance, a desired variant may be one that gives at least 50% of the level of the phosphorylation as the control. In one embodiment, it gives at least 75% of the level of STAT5 phosphorylation in comparison to the control.

[0230] In another embodiment, a binding molecule, particularly an antibody, of the present invention is able to act as an antagonist of the receptor. For instance, in one embodiment, it prevents the binding of IL-2 to the receptor, but does not activate the receptor itself. In one embodiment, a method is provided comprising: (a) contacting a cell expressing the IL-2Rα/IL-2Rβ/γc complex with the candidate; and labelled IL-2; (b) measuring the amount of labelled IL-2 bound to the cell; and (c) comparing the level of IL-2 bound to that seen in the absence of the candidate. If the candidate results in a drop in the amount of labelled IL-2 binding to the cell it is said to have antagonistic activity. In one embodiment, a binding molecule, particularly an antibody, of the invention will reduce IL-2 binding by at least 10%, preferably at least 25%, and more preferably by at least 50%.

[0231] In one preferred embodiment, a binding molecule, particularly an antibody, of the present invention does not bind FcγR. In one preferred embodiment, a binding molecule, particularly a candidate antibody, is assessed both for its ability to bind IL-2R, but also for its ability not to bind to and activate FcγR. In one embodiment, the ability of a binding molecule, particularly an antibody, of the present invention to bind Fc receptors and in particular FcγR is assessed. The lack of binding to Fc receptors may be assessed, for instance to determine whether or not CDC, ADCP or ADCC activity is displayed and preferably neither will be by an antibody of the present invention.

[0232] In another embodiment, the ability of a binding molecule, particularly an antibody, of the present invention to stimulate activation and/or expansion of cells will be assessed, for example to stimulate particular immune cells in that way, as a binding molecule, particularly an antibody, of the present invention will be typically able to bring about activation and/or expansion of cells such as T cells. In one embodiment, ability to stimulate Treg cells and Treg subsets such as CD25bright Tregs, from PBMC is assessed. In one embodiment, ability to expand Tregs is assessed by a method comprising: isolating PBMC and then culturing the PBMC; harvesting the cells and then seeding the PBMC; incubating the cells with a candidate binding molecule, particularly antibody; and performing analysis to determine the number of cells. In a preferred embodiment, a negative control is performed where the cells are cultured without contacting with the candidate. The cells may be assessed using flow cytometry in particular staining for CD4+CD25+CD127−FoxP3+ cells. In a preferred embodiment the number of CD25+CD127−FoxP3+ cells within the CD3+CD4+ cell population is measured. The cells may also be stained with antibodies specific for CD3 and/or CD8. In one preferred embodiment, a binding molecule, particularly an antibody, of the present invention will give higher numbers of CD4+CD25+CD127−FoxP3+ cells compared to incubation without the binding molecule/antibody. In another embodiment, a candidate may also be compared to a specific binding molecule of the present invention, for example to assess whether a variant antibody is also able to expand Tregs to the same or greater degree than the specific binding molecule of the present invention.

[0233] In another preferred embodiment, FoxP3.Luci mice are employed to study Treg cell expansion as the mice express luciferase under the control of the mouse FoxP3 promoter, which acts as a marker for Treg cells. For example, such mice may be injected with a candidate then bioluminescence imaging is used to image Treg cells. A positive control with a known ability to stimulate the proliferation of Tregs cell may be performed, as may be a negative control. In one embodiment a variant or candidate will be compared to a known antibody of the present invention set out herein and if it results in an equivalent or greater level of Tregs as assessed by the bioluminescence imaging in a preferred embodiment it itself is also classified as binding molecule, in particular an antibody, of the present invention. Such assessment may also be combined with ex vivo assessment, for example by subsequently sacrificing the animal, isolating cells, and then analyzing Treg numbers.

[0234] In another preferred embodiment, for testing of human-specific molecules, transgenic mice expressing one or more human IL-2R chains are employed to study Treg levels and in particular expansion. Such transgenic mice can be crossbred with FoxP3.Luci transgenic mice for in vivo imaging of Treg expansion. Upon sacrifice, separate tissues can also be processed via imaging for changed levels of Tregs, versus negative control animals. Treg expansion and Treg/Teff ratios can also be quantitated using flow cytometry, sourcing splenocytes, leukocytes in blood or other tissues. Alternatively, immunodeficient mice such as NSG mice can be injected with human PBMCs, human CD34+ cells or human Tregs and the expansion of Tregs determined via flow cytometry.

[0235] The efficacy of binding molecule, in particular of an antibody, may be assessed in an in vivo system such as in animal models. For example, various models of graft versus host disease (GvHD) may be employed, with a candidate antibody given to such an animal model and then compared to a control animal which is the same animal model for GvHD but which has not been given the antibody. In one embodiment, an antibody of the present invention will present or reduce the GvHD in the animal model. One preferred model for GvHD employs NOD/Scid/IL2Rg−/−(NSG) mice into which human T cells are transferred, for example by the transfer of human PBMCs into the mice. In one preferred embodiment, the model employed is the NOD/Scid/IL2Rg−/− model used in the Examples of the present application. Other animal models may be used in the same way, for example models of conditions such as inflammatory bowel disease, lupus, multiple sclerosis, and type 1 diabetes.

### Pharmaceutical Compositions

[0236] In one embodiment, the present invention provides a pharmaceutical composition comprising: (a) a binding molecule of the present invention; and (b) a pharmaceutically acceptable carrier, diluent, and/or excipient. The particularly preferred binding molecule for any of the pharmaceutical compositions of the present invention is an antibody. In one embodiment, a pharmaceutical composition of the present invention comprises binding molecule of the present invention as well as a carrier, a stabilizer, an excipient, a diluent, a solubilizer, a surfactant, an emulsifier, a preservative and/or adjuvant. In one embodiment, a pharmaceutical composition of the present invention is in solid or liquid form. In one embodiment, the pharmaceutical composition may be in the form of a powder, a tablet, a solution or an aerosol. In one embodiment, a pharmaceutical composition of the present invention is provided in a frozen form. In one embodiment, a pharmaceutical composition of the present invention is provided in lyophilized form.

[0237] A pharmaceutical composition of the present invention will usually be supplied as a sterile, pharmaceutical composition. A pharmaceutical composition of the present invention may additionally comprise a pharmaceutically acceptable adjuvant. In another embodiment, no such adjuvant is present in a pharmaceutical composition of the present invention. The present invention also provides a process for preparation of a pharmaceutical or medicament composition comprising adding and mixing binding molecule of the present invention together with one or more of a pharmaceutically acceptable excipient, diluent or carrier.

[0238] Pharmaceutically acceptable carriers in therapeutic compositions may additionally contain liquids such as water, saline, glycerol and ethanol. Such carriers may be used, for example, so that the pharmaceutical compositions to be formulated as tablets, pills, dragées, capsules, liquids, gels, syrups, slurries and suspensions, for ingestion by the patient. The term “pharmaceutically acceptable excipient” as used herein typically refers to a pharmaceutically acceptable formulation carrier, solution or additive to enhance the desired characteristics of the compositions of the present invention. Excipients are well known in the art and include buffers (e.g., citrate buffer, phosphate buffer, acetate buffer, and bicarbonate buffer), amino acids, urea, alcohols, ascorbic acid, phospholipids, proteins (e.g., serum albumin), EDTA, sodium chloride, liposomes, mannitol, sorbitol, and glycerol. Solutions or suspensions can be encapsulated in liposomes or biodegradable microspheres. Suitable carriers may be large, slowly metabolised macromolecules such as proteins, polypeptides, liposomes, polysaccharides, polylactic acids, polyglycolic acids, polymeric amino acids, amino acid copolymers and inactive virus particles. Pharmaceutically acceptable salts can be used, for example mineral acid salts, such as hydrochlorides, hydrobromides, phosphates and sulphates, or salts of organic acids, such as acetates, propionates, malonates, and benzoates.

[0239] In certain embodiments, the pharmaceutical composition may contain formulation materials for the purpose of modifying, maintaining or preserving certain characteristics of the composition such as the pH, osmolarity, viscosity, clarity, color, isotonicity, odour, sterility, stability, rate of dissolution or release, adsorption or penetration. A thorough discussion of pharmaceutically acceptable carriers is available in Remington's Pharmaceutical Sciences (Mack Publishing Company, N.J. 1991). Additional pharmaceutical compositions include formulations involving the antibody of the present invention in sustained or controlled delivery formulations. Techniques for formulating a variety of sustained-or controlled-delivery means are known to those skilled in the art. A binding molecule, in particular antibody, of the present invention may also be entrapped in microcapsules prepared, for example, by coacervation techniques or by interfacial polymerization, in colloidal drug delivery systems, or in macroemulsions. Such techniques are also disclosed in Remington's Pharmaceutical Sciences.

[0240] A subject will be typically administered a therapeutically effective amount of a pharmaceutical composition and hence of a binding molecule, in particular an antibody, of the present invention. The term “therapeutically effective amount” typically refers to an amount of a therapeutic agent needed to treat, ameliorate or prevent a targeted disease or condition, or to exhibit a detectable therapeutic or preventative effect. The precise therapeutically effective amount for a human subject will depend upon the severity of the disease state, the general health of the subject, the age, weight and gender of the subject, diet, time and frequency of administration, drug combination(s), reaction sensitivities, and tolerance/response to therapy. This amount can be determined by routine experimentation and is within the judgement of the clinician. For example, a low dose may be used initially and then increased if needed to be based on the response seen. Generally, a therapeutically effective amount will be from 0.01 mg/kg to 50 mg/kg, for example 0.1 mg/kg to 20 mg/kg per day. Alternatively, the dose may be 1 to 500 mg per day, such as 10 to 100, 200, 300 or 400 mg per day. In one embodiment, the amount in a given dose is at least enough to bring about a particular function.

[0241] In one embodiment, a binding molecule, in particular an antibody, of the present invention may be given in combination with another treatment for the condition being treated. For example, a binding molecule, in particular an antibody, of the present invention may be provided simultaneously, sequentially, or separately with such a further agent. In another embodiment, an antibody of the present invention may be provided in the same pharmaceutical composition as a second therapeutic agent.

[0242] In one preferred embodiment, the therapeutic agent of the invention, when in a pharmaceutical preparation, may be present in unit dose forms. Suitable doses may be calculated for patients according to their weight, for example suitable doses may be in the range of 0.01 to 20 mg/kg, for example 0.1 to 20 mg/kg, for example 1 to 20 mg/kg, for example 10 to 20 mg/kg or for example 1 to 15 mg/kg, for example 10 to 15 mg/kg. To effectively treat conditions of use in the present invention in a human, suitable doses may be within the range of 0.001 to 10 mg, 0.01 to 1000 mg, for example 0.1 to 1000 mg, for example 0.1 to 500 mg, for example 500 mg, for example 0.1 to 100 mg, or 0.1 to 80 mg, or 0.1 to 60 mg, or 0.1 to 40 mg, or for example 1 to 100 mg, or 1 to 50 mg, of a dual targeting protein of this invention, which may be administered parenterally, for example subcutaneously, intravenously or intramuscularly. Such a dose may be, if necessary, repeated at appropriate time intervals selected as appropriate by a physician. A binding molecule, and in particular an antibody, of the present invention may be, for instance, lyophilized for storage and reconstituted in a suitable carrier prior to use. Lyophilization and reconstitution techniques can be employed.

[0243] The binding molecules, in particular antibodies, and pharmaceutical compositions of this invention may be administered by any number of routes including, but not limited to, oral, intravenous, intramuscular, intra-arterial, intramedullary, intrathecal, intraventricular, transdermal, transcutaneous (for example, see WO 98/20734), subcutaneous, intraperitoneal, intranasal, enteral, topical, sublingual, intravaginal or rectal routes. Hyposprays may also be used to administer the pharmaceutical compositions of the invention. Direct delivery of the compositions will generally be accomplished by injection, subcutaneously, intraperitoneally, intravenously or intramuscularly, or delivered to the interstitial space of a tissue. In one preferred embodiment, administration is via intravenous administration. In another preferred embodiment, administration is via subcutaneous administration, for example via subcutaneous injection. The compositions can also be administered into a specific tissue of interest. In some embodiments, administration is via site-specific or targeted local delivery techniques. Examples of site-specific or targeted local delivery techniques include various implantable depot sources of the antibody molecule or local delivery catheters, such as infusion catheters, indwelling catheters, or needle catheters, synthetic grafts, adventitial wraps, shunts and stents or other implantable devices, site specific carriers, direct injection, or direct application.

[0244] Dosage treatment may be a single dose schedule or a multiple dose schedule. Where the product is for injection or infusion, it may take the form of a suspension, solution or emulsion in an oily or aqueous vehicle and it may contain formulary agents, such as suspending, preservative, stabilising and/or dispersing agents. Alternatively, the pharmaceutical may be in dry form, for reconstitution before use with an appropriate sterile liquid. In one embodiment, a pharmaceutical composition comprising an antibody of the present invention is provided in lyophilised form. If a composition is to be administered by a route using the gastrointestinal tract, the composition will typically need to contain agents which protect the binding molecule, in particular antibody, from degradation but which release the binding molecule once it has been absorbed from the gastrointestinal tract. In another embodiment, a nebulisable formulation according to the present invention may be provided, for example, as single dose units (e.g., sealed plastic containers or vials) packed in foil envelopes. Each vial contains a unit dose in a volume, e.g., 2 ml, of solvent/solution buffer.

[0245] A pharmaceutical composition of the present invention may be provided in a receptacle that provides means for administration to a subject. In one embodiment, a pharmaceutical composition of the present invention may be provided in a prefilled syringe. The present invention therefore provides such a loaded syringe. It also provides an auto-injector loaded with a pharmaceutical composition of the present invention.

[0246] In one embodiment the formulation is provided as a formulation for topical administrations including inhalation. Suitable inhalable preparations include inhalable powders, metering aerosols containing propellant gases or inhalable solutions free from propellant gases. Inhalable powders according to the invention containing the active substance may consist solely of the abovementioned active substances or of a mixture of the abovementioned active substances with physiologically acceptable excipient. These inhalable powders may include monosaccharides (e.g., glucose or arabinose), disaccharides (e.g., lactose, saccharose, maltose), oligo- and polysaccharides (e.g., dextranes), polyalcohols (e.g., sorbitol, mannitol, xylitol), salts (e.g., sodium chloride, calcium carbonate) or mixtures of these with one another. Mono- or disaccharides are suitably used, the use of lactose or glucose, particularly but not exclusively in the form of their hydrates.

[0247] Particles for deposition in the lung require a particle size less than 10 microns, such as 1-9 microns for example from 1 to 5 μm. The particle size of the active ingredient such as the antibody or fragment is of primary importance. The propellant gases which can be used to prepare the inhalable aerosols are known in the art. Suitable propellant gases are selected from among hydrocarbons such as n-propane, n-butane or isobutane and halohydrocarbons such as chlorinated and/or fluorinated derivatives of methane, ethane, propane, butane, cyclopropane or cyclobutane. The above mentioned propellent gases may be used on their own or in mixtures thereof. Particularly suitable propellent gases are halogenated alkane derivatives selected from among TG 11, TG 12, TG 134a and TG227. Of the above-mentioned halogenated hydrocarbons, TG134a (1,1,1,2-tetrafluoroethane) and TG227 (1,1,1,2,3,3,3-heptafluoropropane) and mixtures thereof are particularly suitable. The propellent-gas-containing inhalable aerosols may also contain other ingredients such as cosolvents, stabilisers, surface-active agents (surfactants), antioxidants, lubricants and means for adjusting the pH. All these ingredients are known in the art. The propellant-gas-containing inhalable aerosols according to the invention may contain up to 5% by weight of active substance. Aerosols according to the invention contain, for example, 0.002 to 5% by weight, 0.01 to 3% by weight, 0.015 to 2% by weight, 0.1 to 2% by weight, 0.5 to 2% by weight or 0.5 to 1% by weight of active ingredient.

[0248] Alternatively topical administrations to the lung may also be by administration of a liquid solution or suspension formulation, for example employing a device such as a nebulizer, for example, a nebulizer connected to a compressor (e.g., the Pari LC-Jet Plus (R) nebulizer connected to a Pari Master (R) compressor manufactured by Pari Respiratory Equipment, Inc., Richmond, Va.).

[0249] Nebulisable formulation according to the present invention may be provided, for example, as single dose units (e.g., sealed plastic containers or vials) packed in foil envelopes. Each vial contains a unit dose in a volume, e.g., 2 mL, of solvent/solution buffer. The present invention also provides a syringe loaded with a composition comprising an antibody of the invention. In one embodiment, a pre-filled syringe loaded with a unit dose of an antibody is provided. In another embodiment, an autoinjector loaded with a binding molecule, in particular an antibody, of the invention is provided. In a further embodiment, an IV bag loaded with a pharmaceutical composition of the invention is provided.

[0250] It is also envisaged that an antibody of the present invention may be administered by use of gene therapy. In order to achieve this, DNA sequences encoding the binding molecule, in particular antibody, under the control of appropriate DNA components are introduced into a patient such that the binding molecule, in particular antibody chains and so antibody, are expressed from the DNA sequences and assembled in situ.

[0251] Once formulated, the compositions of the invention can be administered directly to the subject. By “subject” or “individual” or “animal” or “patient” or “mammal,” is meant any subject, particularly a mammalian subject, for whom diagnosis, prognosis, or therapy is desired. Mammalian subjects include humans, domestic animals, farm animals, and zoo, sports, or pet animals such as dogs, cats, guinea pigs, rabbits, rats, mice, horses, cattle, cows, and so on. In a preferred embodiment, the subject to be treated is a mammal. The subjects to be treated can be animals. However, in one or more embodiments the compositions are adapted for administration to humans. In a particularly preferred embodiment, the subject is human.

### Kits

[0252] The present invention also extends to a kit comprising a binding molecule, in particular an antibody, of the invention, optionally with instructions for administration. In yet another embodiment, the kit further comprises one or more reagents for performing one or more functional assays. In another embodiment, a kit containing single-chambered or multi-chambered pre-filled syringes is provided which is pre-filled with a pharmaceutical composition of the invention. The invention also provides a kit for a single-dose administration unit which comprises a pharmaceutical composition of the invention. In another embodiment, the kit comprises packaging.

### Pathological Conditions, Medical, and Diagnostic Uses

[0253] Also provided is a binding molecule, in particular an antibody, of the present invention for use as a medicament. In another embodiment a binding molecule, in particular an antibody, of the present invention is provided for use in a method of therapy of the human or animal body. Please note that, in the various therapeutic uses set out herein where reference is made to a binding molecule or an antibody of the present invention, a pharmaceutical composition comprising it may be also employed and vice versa unless stated otherwise, as may be a composition encoding an antibody of the invention. A binding molecule, in particular an antibody, of the present invention may also be used in diagnosis, including in both in vivo diagnosis and also in vitro diagnosis, for example such diagnosis performed on a sample from a subject.

[0254] As discussed further below, a binding molecule, in particular an antibody, of the present invention may be employed to treat a condition. As used herein, the terms “treat” or “treatment” refer to both therapeutic treatment and prophylactic or preventative measures, wherein the object is to prevent or slow down (lessen) an undesired physiological change or disorder. Beneficial or desired clinical results include, but are not limited to, alleviation of symptoms, diminishment of extent of disease, stabilized (i.e., not worsening) state of disease, delay or slowing of disease progression, amelioration or palliation of the disease state, and remission (whether partial or total), whether detectable or undetectable. “Treatment” can also mean prolonging survival as compared to expected survival if not receiving treatment. Those in need of treatment include those already with the condition or disorder as well as those prone to have the condition or disorder or those in which the condition or disorder is to be prevented.

[0255] The binding molecule, in particular antibody, of the invention may be used to treat any condition that would benefit. For instance, it may be used to treat an autoimmune condition. For instance, examples of conditions that may be treated include:
[0256] (multispecific conditions:) graft versus host disease (GvHD), systemic lupus erythematosus (SLE) rheumatoid arthritis (RA) (e.g., juvenile rheumatoid arthritis, polyarticular juvenile idiopathic arthritis, psoriatic arthritis, pediatric arthritis, osteoarthritis), type 1 diabetes (TID), autoimmune hepatitis, alopecia areata, polychondritis, ankylosing spondylitis,
[0257] (gastro-intestinal tract conditions:) Crohn's disease (CD), ulcerative colitis (UC), pouchitis, celiac disease,
[0258] (muscle conditions:) polymyalgia, polymyositis, idiopathic inflammatory myopathy (IIM), myasthenia gravis,
[0259] (skin conditions:) psoriasis, dermatitis, atopic dermatitis, eczema, scleroderma, pemphigus vulgaris, bullous pemphigoid,
[0260] (nerve conditions:) multiple sclerosis (MS), Guillain-Barré syndrome, amyotrophic lateral sclerosis (ALS), chronic inflammatory demyelinating polyneuropathy (CIDP),
[0261] (glandular conditions:) Sjögren's syndrome, Grave's disease, Hashimoto's thyroiditis, Addison's disease,
[0262] (blood conditions:) vasculitis, Behcet's disease, Takayasu's arteritis, granulomatosis with polyangitisis, antiphospholipid syndrome (APS), idiopathic thrombocytopeni purpura (ITP), and
[0263] (conditions affecting airways:) birch pollen allergy, asthma, respiratory-COVID19.

[0264] In one preferred embodiment, the invention may be used to treat or prevent graft versus host disease (GvHD). In one embodiment, the autoimmune disease is selected from type 1 diabetes (TID), multiple sclerosis (MS), Crohn's disease (CD), ulcerative colitis (UC), psoriasis, Guillain-Barré syndrome (GBS), systemic lupus erythematosus (SLE), rheumatoid arthritis (RA), chronic inflammatory demyelinating polyneuropathy (CIDP), Hashimoto's thyroiditis, celiac disease, Addison's disease, autoimmune hepatitis, antiphospholipid syndrome (APS), and Grave's disease. In another embodiment, the autoimmune disease is selected from diseases where the autoreactive T cell compartment, potentially in collaboration with autoreactive B cells, contributes significantly to disease pathology. Such diseases include, but are not limited to myasthenia gravis, pemphigus vulgaris, and bullous pemphigoid.

[0265] In one embodiment, the disease to be treated is selected from acute or chronic GvHD, SLE, autoimmune hepatitis, ulcerative colitis, and eczema. In another embodiment, the disease to be treated is selected from alopecia areata, type 1 diabetes, SLE, multiple sclerosis, birch pollen allergy, pemphigus vulgaris, bullous pemphigoid, amyotrophic lateral sclerosis (ALS), polymyalgia, Behcet's disease, polychondritis, idiopathic inflammatory myopathy (IIM), Crohn's disease, rheumatoid arthritis, psoriasis, dermatitis, respiratory-COVID19, vasculitis, idiopathic thrombocytopenia purpura (ITP), and polymyositis. In a further preferred embodiment, the disease to be treated is selected from Takayasu's arteritis, ankylosing spondylitis, granulomatosis with polyangiitis, and Sjögren's syndrome. Particularly preferred disorders to be treated are GvHD, atopic dermatitis, and psoriasis. Other preferred disorders to be treated are ulcerative colitis and SLE.

[0266] In one embodiment, a binding molecule, in particular an antibody, of the invention is used to treat or prevent an immune response against a transplant. Examples of organs and tissues that can be transplanted in a mammal that can be treated as described herein include, without limitation, skin, bone, blood, heart, liver, kidney, pancreas, intestine, stomach, testis, penis, cornea, bone marrow, and lung. A transplant can be an allogeneic transplant or an autologous transplant. In some cases, the materials and methods described herein also can be used to treat a mammal having a complication or disease associated with a transplant (e.g., GvHD). In one embodiment, the transplant reject is of an autologous transplant or an allogenic transplant.

[0267] In some cases, a binding molecule, in particular an antibody, of the present invention can be administered as a combination therapy with one or more additional treatments used to treat an autoimmune disease and/or one or more additional immunosuppressants. For example, a combination therapy used to treat an autoimmune disease can include administering to the subject a binding molecule, in particular an antibody, as described herein and one or more autoimmune disease treatments such as an adoptive cell (e.g., Treg) transfer, tolerogenic vaccination, an immune checkpoint agonist, and/or steroid administration. For example, a combination therapy used to enhance an immune response can include administering to the mammal an antibody as described herein and one or more immunosuppressants such as cyclosporine, rapamycin, methotrexate, azathioprine, chlorambucil, leflunomide, and/or mycophenolate mofetil.

[0268] As discussed further below, a binding molecule, in particular an antibody, of the present invention may be employed to treat a condition. As used herein, the terms “treat” or “treatment” refer to both therapeutic treatment and prophylactic or preventative measures, wherein the object is to prevent or slow down (lessen) an undesired physiological change or disorder. Beneficial or desired clinical results include, but are not limited to, alleviation of symptoms, diminishment of extent of disease, stabilized (i.e., not worsening) state of disease, delay or slowing of disease progression, amelioration or palliation of the disease state, and remission (whether partial or total), whether detectable or undetectable. “Treatment” can also mean prolonging survival as compared to expected survival if not receiving treatment. Those in need of treatment include those already with the condition or disorder as well as those prone to have the condition or disorder or those in which the condition or disorder is to be prevented.

[0269] In one particularly preferred embodiment, a binding molecule, in particular an antibody, of the present invention may be used to modulate the immune system. For example, it may be used to stimulate cells of the immune system, for instance activating particular cells of the immune system. In one embodiment the cells may be stimulated to proliferate. In one preferred embodiment, a binding molecule, in particular an antibody, of the present invention is used to activate cells expressing high affinity IL-2R on their surface. For example, the cells in question may be white blood cells and in particular T cells. In a particularly preferred embodiment, a binding molecule, in particular an antibody, of the present invention is used to activate Treg cells, in particular CD25bright Tregs. For example, a binding molecule, in particular an antibody, of the present invention may be used to stimulate Treg cells which in turn suppress, reduce, or prevent an immune response.

[0270] The ability of the present invention to modulate the immune system means that it represents a particular good way to target, for example, an autoimmune disorder, or an inflammatory disorder. Hence, the present invention provides for a binding molecule, in particular an antibody, or pharmaceutical composition of the present invention for use in a method of treating or preventing an autoimmune disorder, or an inflammatory disorder. The present invention provides a binding molecule, in particular an antibody, or pharmaceutical composition for use in such a method wherein:
[0271] (a) the disorder is graft versus host disease (GvHD), preferably where the antibody is for use in a method where it is administered prior to, at the same time, or after a transplant of a cell, tissue, or organ; or
[0272] (b) the disorder is one involving dysfunction or unwanted proliferation of leukocytes, preferably of T cells, more preferably of Teff cells; such disorders may present with an imbalance of Tregs compared to Teff cells, for example due to increased numbers or activity of Teff which is not balance the numbers and/or immunosuppressive properties of Tregs and in one embodiment the present invention promotes Tregs and in particular shifts the balance with effector cell to, or towards, normal.
[0273] (c) the disorder is selected from inflammatory bowel disease (such as ulcerative colitis, Crohn's disease, pouchitis, or celiac disease), multiple sclerosis, myasthenia gravis, skin autoimmune diseases such as pemphigus vulgaris or bullous pemphigoid, and type 1 diabetes.

[0274] The present invention may be used in treating graft versus host disease (GvHD). In one embodiment, the present invention is employed to promote Treg activity prior to a cell, tissue or organ transplant. For example, in one embodiment the present invention is used to promote Treg activity before transplantation of cells, in particular prior to transplantation of stem cells, and preferably before the transplantation of hematopoietic stem cells. In another embodiment, rather than stimulate Tregs in the recipient prior to transplantation, the invention is used to expand Tregs in a cell population, tissue, or organ that is to be transplanted to the host. In a further embodiment, they are used as part of the treatment for non-malignant hematopoietic diseases.

[0275] The present invention may be used to reduce, prevent or treat an immune response against a transplant, for example against transplanted cells, tissue or an organ. Hence, the invention may be used to reduce, prevent or treat graft versus host disease (GvHD). In one embodiment the GvHD is chronic (cGvHD). In one embodiment, the present invention may be used in that way where what is transplanted are cells such as a cell population. In one embodiment, the transplanted material is, or comprises, haematopoietic stem cells (HSCs). In another embodiment, the transplanted material may be an organ or tissue, such as the transplant of a heart, lung, kidney, cornea, or other organ. In another embodiment, the transplanted material may be a graft, such as a skin graft. In one embodiment, the present invention provides a method that comprises administering a binding molecule, in particular an antibody, of the present invention to treat, prevent, or ameliorate an unwanted immune response against transplanted cells, tissues or organs. In one embodiment, the method may actually further comprise performing the transplant. In another embodiment, the binding molecule, in particular antibody, of the present invention is given to the subject before, during, and/or after the transplant. In a further embodiment, rather than administration of the binding molecule, in particular antibody, to the subject the method comprises treating the material to be transplanted ex vivo with a binding molecule before it is transplanted. In one embodiment, a binding molecule of the present invention may be used to expand Treg cells prior to transplantation into a subject and may also activate the Treg cells. In one embodiment, the invention provides a way to expand and activate Tregs ex vivo.

[0276] In one embodiment, rather than treat, prevent, or ameliorate the disease itself, the invention is employed to help ensure that the treatment for the disease, namely the transplanted cells, tissue, or organ, is effective by preventing or reducing the severity of GvHD. Hence, the present invention may be employed in a variety of embodiments where a disease is treated by transplanting cells, tissue or organ. In one preferred embodiment, the condition may be one treated via a stem cell transplant, for example a hematopoietic stem cell (HSC) transplant. In some embodiments, the subject has or is otherwise affected by a metabolic storage disorder which is to be treated by a transplant. The subject may suffer or otherwise be affected by a metabolic disorder selected from the group consisting of glycogen storage diseases, mucopolysaccharidoses, Gaucher's disease, Hurler's disease, sphingolipidoses, metachromatic leukodystrophy, or any other diseases or disorders which may benefit from the treatments and therapies disclosed herein and including, without limitation, severe combined immunodeficiency (SCID), Wiskott-Aldrich syndrome, hyper immunoglobulin M (IgM) syndrome, Chediak-Higashi disease (CHS), hereditary lymphohistiocytosis, systemic sclerosis, systemic lupus erythematosus, multiple sclerosis, juvenile rheumatoid arthritis and those diseases, or disorders described in “Bone Marrow Transplantation for Non-Malignant Disease,” ASH Education Book, 1:319-338 (2000), the disclosure of which is incorporated herein by reference in its entirety as it pertains to pathologies that may be treated by administration of hematopoietic stem cell transplant therapy. In one embodiment, where the invention concerns transplantation, it may be that the transfer is of allogenic cells, tissues, or organs. In one embodiment, the transferred cells may be cells expressing a chimeric antigen receptor (CAR). In some embodiments, the subject is in need of chimeric antigen receptor T-cell (CART) therapy. Such T cells can be Teff, but also Treg cells. For instance, such therapy may form part of a method of the present invention. In another preferred embodiment, the invention provides a method of promoting the engraftment of a cell population, tissue, or organ in a subject by treating, reducing, or preventing an immune response against said population, tissue, or organ.

[0277] The ability of a binding molecule, in particular an antibody, of the present invention to modulate the immune system also makes it a particularly valuable approach for targeting autoimmune disease. Hence, in another embodiment, the subject to be treated has an autoimmune disorder. In one particularly preferred embodiment, the autoimmune disorder is multiple sclerosis. In a further particular preferred embodiment, the subject has ulcerative colitis. In another particularly preferred embodiment, the condition is scleroderma. In one embodiment, the condition to be treated is lupus. Further examples of autoimmune diseases include scleroderma, Crohn's disease, type 1 diabetes, or another autoimmune pathology described herein. In one embodiment, the autoimmune disease to be treated is selected from ulcerative colitis, Crohn's disease, celiac disease, inflammatory bowel disease, multiple sclerosis, lupus, Graves' disease and type 1 Diabetes. In one embodiment, the subject has type 1 Diabetes and that is treated.

[0278] In one preferred embodiment, the condition treated is a condition involving unwanted inflammation. In one preferred embodiment, the condition is arthritis. For example, the present invention may be used to treat rheumatoid or osteo-arthritis. Non-limiting types of Examples of diseases which may be treated include rheumatoid arthritis, polyarticular juvenile idiopathic arthritis, psoriatic arthritis, and paediatric arthritis. In another preferred embodiment, the condition to be treated is selected from multiple sclerosis, ankylosing spondylitis, Crohn's disease, and ulcerative colitis.

[0279] In one embodiment, the ability of the invention to stimulate Treg cells is employed as a way to treat allergy. In another embodiment, the ability to stimulate Treg cells may be employed as a way to treat asthma.

[0280] The invention may also be used to treat aging, in particular age related inflammation. For example, individuals may display chronic, senescence associated inflammation as a function of older age which can be reduced by promoting Tregs using the binding molecule of the present invention.

[0281] In one embodiment, a binding molecule of the present invention is used to preferentially activate Treg cells, for example as compared to Teff cells. In one embodiment, a binding molecule of the invention is used to activate Treg cells and hence to downregulate an immune response, for instance as a way of treating one of the conditions mentioned herein. In one embodiment, the invention may be used to treat a disease that can be treated or ameliorated by expansion of Tregs. In another embodiment, a binding molecule of the present invention is used to treat one of the disorders mentioned herein by expanding the number of Tregs in an individual, in particular by expanding Treg numbers and activating those Tregs.

### Detection and Diagnosis

[0282] A binding molecule, in particular an antibody, of the present invention may be used to detect any of the chains of the IL-2R that it is specific for. For example, the present invention provides a method comprising contacting a binding molecule, in particular an antibody, of the present invention with a test sample and detecting any binding of a binding molecule. A binding molecule of the present invention may be labelled or linked to an enzyme which allows the detection of the binding molecule and hence that the binding molecule has bound. In one embodiment, such detections methods may be, for instance, ELISA assays or flow cytometry as a way to detect whether or not cells in a test sample express IL-2R on their surface. A binding molecule, in particular antibody, of the present invention may be used in in vitro detection, it may also be used in detection of IL-2R in vivo.

[0283] In one embodiment, the present invention provides an in vivo method for detecting IL-2R that comprises administering a labelled binding molecule, in particular antibody, of the present invention and then detecting the location of the binding molecule in the body of a subject. In another embodiment, an antibody of the present invention may be used in the diagnosis of a condition, for example in identifying a reduction of cells expressing IL-2R. In one preferred embodiment, the present invention provides a method of patient stratification comprising subdividing patients on the basis of the level of IL-2R expression.

[0284] The present invention also provides a kit for detecting IL-2R comprising a binding molecule, in particular an antibody, of the present invention and optionally instructions for employing the antibody in a method of detecting IL-2R.

[0285] In one embodiment, the present invention provides a binding molecule, in particular an antibody, of the present invention as a companion diagnostic, for instance to determine whether or not to administer a drug to a subject based on detection of IL-2R, such as levels of IL-2R, for instance the number of particular cell types expressing IL-2R or their location.

[0286] In one embodiment, a monovalent binding molecule of the present invention may be used in diagnosis that binds just one of the α, β, γc polypeptides. Such monovalent molecules may be used to detect the individual polypeptide. In a further embodiment, bivalent binding molecules of the invention may be used to detect two of the α, β, γc polypeptides. In one preferred embodiment, the bivalent molecule binds both the β and γc polypeptides. Hence, the detection methods outlined herein can be used for detecting one chain, two chain, or all three chains.

[0287] All documents referred to herein are incorporated by reference. Reference herein to the singular, using terms such as “a” and “an” also encompasses the plural unless specifically stated otherwise. Where something is referred to herein as “comprising” in another embodiment what the invention may “consist essentially of” what is set out. In another embodiment, it may “consist of” what is set out. Unless defined otherwise, all technical and scientific terms used herein have the meaning commonly understood by a person skilled in the art to which this invention belongs.

### EXAMPLES

[0288] The invention will be further understood with reference to the following non-limiting Examples.

### Example 1: Generation of Monoclonal Antibodies Targeting IL-2Rα, IL-2Rβ and IL-2Rγ

### A. Llama Immunization and Library Construction

[0289] Two llamas were immunized with a mix of three pUNO1 plasmids encoding the human IL-2Rα (pUNO1-hIL02RA), IL-2Rβ and IL-2Rγ proteins under control of constitutively active EF-1α/HTLV promoter (Invivogen) in a 2:1:2 mass ratio. Intramuscular DNA injections were repeated a total of 6 times with 2-week intervals. Blood samples of 10 mL were collected pre- and post-immunization to investigate immune response. Four days after the last immunization, 400 mL blood from each immunized llama was collected to isolate PBMCs using Ficoll-Paque gradient and used for RNA extraction. Total RNA was then converted into random primed cDNA using reverse transcriptase, and gene sequences encoding for VHH regions of llama heavy chain-only antibodies were amplified by PCR and subcloned into a phagemid vector.

[0290] Specific immune responses to human IL-2Rα, IL-2Rβ and IL-2Rγ were measured by ELISA on coated recombinant proteins. Both immunized llamas showed a strong immune response against human IL-2Rα, IL-2Rβ and IL-2Rγ when pre- and post-immune sera were compared.

### B. Selection of VHH Binding to IL-2Rα, IL-2Rβ and IL-2Rγ

[0291] Llama VHH phage display libraries in pDCL1 vector were generated and used for selections against the different subunits of the human IL-2R. The VHH-pDCL1 phage display libraries passed the QC criteria of size above 1.0E+08 and showed 100% VHH insert percentage.

[0292] Specific VHH antibody fragments were identified by selecting and screening using recombinant human and mouse IL-2Rα, IL-2Rβ and IL-2Rγ proteins as antigens. Two parallel phage display selection strategies were used to identify antibodies binding to the different subunits of the IL-2 receptor: either in-solution selections on pre-captured antigens or panning on antigens coated on a plate. In-solution selections were performed using the KingFisher™ Flex system. In the first round the human proteins were used, in rounds two and three both human and mouse IL-2R proteins were used.

[0293] Very high phage enrichments were observed for selections performed on both human and mouse IL-2Rα, IL-2Rβ and IL-2Rγ for one of the animals; outputs on mouse receptor subunits indicated presence of cross-reactive binders. Selections using library from the other animal resulted in high enrichment only for human IL-2Rβ.

### C. VHH Screening and Characterisation

[0294] Individual clones were isolated and periplasmic extracts (P.E.) containing soluble VHH fragments were produced and screened in a binding ELISA and by surface plasmon resonance (SPR).

[0295] In a binding ELISA, human or mouse IL-2Rα, IL-2Rβ and IL-2Rγ proteins were coated directly on maxisorp microtiter plates overnight at 4° C. Free binding sites were blocked using 4% Marvel in PBS for 1 hour. Next, 1:5 dilution of P.E. in 1% Marvel/PBS were added to wells and incubated for 1 hour. After incubation and an extensive PBS washing step, VHH binding was revealed using mouse anti-c-myc IgG and anti-mouse IgG-HRP antibodies. Binding specificity was determined based on O.D. at 450 nm values compared to negative controls.

[0296] SPR was performed to determine dissociation rates using Biacore 3000 instrument (GE Healthcare). Briefly, human and mouse IL-2R proteins were immobilized on carboxylmethyl dextran sensor chip (CM5) at approximately 2500 RUs using amine coupling in acetate buffer (GE Healthcare). The VHH-containing P.E. were loaded with a flow rate of 30 uL/min and the off-rates were measured over a 120s period.

[0297] VHH clones that showed binding to IL-2R subunits were sequenced and divided into families based on the sequence of the VHH CD3 region. 85 IL-2Rα-, 153 IL-2Rβ-, 92 IL-2Rγ-specific clones with unique VHH sequences were identified, which resulted in 15, 38, and 7 VHH CDR3 families, respectively.

[0298] The binding characteristics and the VHH CD3 sequences of the selected clones are shown in TABLE 1.

### D. Monospecific Antibody Purification and Characterisation

[0299] For each IL-2R subunit, 10 clones displaying varying characteristics were reformatted as VHH-human Fc fusion molecules. For this purpose, the cDNA encoding the VHH of each clone was engineered into a mammalian expression vector comprising the cDNA encoding the CH2 and CH3 domains of human IgG1 and containing mutations that abrogate antibody effector functions mediated by the Fc receptor. Particularly, the molecules comprised the amino acid substitutions L234A, L235A and P329G (EU numbering) in the immunoglobulin heavy chains.

[0300] Antibody molecules were subsequently produced by transient transfection in HEK293E cells and purified from cell supernatant by protein A affinity chromatography. Finally, SDS-PAGE analysis was carried out to assess the purity and the integrity of the VHH-human Fc molecules. Produced proteins were highly pure and of correct size (around 78 kDa).

### Example 2: In vitro characterisation of monospecific antibodies targeting the IL-2Rα, IL-2Rβ and IL-2Rγ

### A. Epitope Mapping

[0301] Biacore 3000 system (GE Healthcare) was used to determine whether IL-2Rα-, IL-2Rβ- and IL-2Rγ-specific antibodies compete for the same epitope or bind a different one on their respective targets. A CM5 sensor chip was coated with human IL-2Rα, IL-2Rβ and IL-2Rγ proteins at approximately 100 RU using standard amine coupling. Antibodies were diluted in HBS-EP pH 7.4 buffer at a concentration of 100 nM. Antibodies binding to the same IL-2R subunit were injected pairwise using the Biacore COINJECT method and a flow rate of 30 μL/min. An increased signal observed after the injection of a second antibody indicates that it binds to another epitope on its target than the first antibody. IL-2Rα-, IL-2Rβ- and IL-2Rγ-specific antibodies bound to three, three and four distinct epitopes on their target, respectively (TABLE 1).

[0302] The same setup was used to test whether anti-IL-2Rα antibodies blocked human IL-2 binding to human IL-2Rα (CD25). Here, each antibody injection was followed by injection with 100 nM human IL-2. IL-2Rα-specific antibodies from one epitope bin (H) did not block the binding of human IL-2 to human IL-2Rα, while the antibodies from the other two epitope bins (I and J) were blocking (TABLE 1).

### B. Binding to HEK-Blue IL-2 Cells

[0303] The ability of monospecific anti-IL-2Rα, anti-IL-2Rβ and anti-cy antibodies to bind the human IL-2 receptor was analysed using HEK-Blue IL-2 recombinant cell line (Invivogen, #hkb-il2) overexpressing the three IL-2R subunits. Cell culture was performed following the manufacturer's protocol. Cells were seeded at 100 000 cells/well in a 96-well plate, washed with FACS buffer, and incubated with antibodies diluted in FACS buffer at the concentration of 10 nM for 1 hour at 4° C., washed again with FACS buffer and stained with anti-human IgG-PE detection antibody (eBioscience) for 1 hour at 4° C. Dead cells were excluded from the analysis by using a fixable viability dye (eFluor780, eBioscience). Stained cells were analyzed on a LSR Fortessa flow cytometer (BD Biosciences). Final analysis and graphic output were performed with FlowJo v10.7.1 software (BD Biosciences) and GraphPad Prism version 8 (GraphPad Software). The dose-response binding curves were fit to a nonlinear regression model (log (agonist) vs. response with a variable slope (four parameters)).

[0304] The cell binding properties of monospecific anti-IL-2Rα, anti-IL-2Rβ and anti-γc antibodies are shown in FIG. 1A. IL-2Rα and IL-2Rβ-specific clones display high and intermediate cell binding, respectively, while no binding is detected with anti-γc antibodies.

[0305] The monospecific monovalent anti-IL-2Rα antibodies were further tested at multiple concentrations; the dose-response curves for cell binding on HEK-Blue IL-2R cells are shown in FIG. 1B.

C. Interference with Human IL-2 Binding to its Receptor

[0306] The ability of monospecific anti-IL-2Rα, anti-IL-2Rβ and anti-IL-2Rγ antibodies to compete with the human IL-2 binding to its receptor was analysed using HEK-Blue IL-2R recombinant cell line (Invivogen, #hkb-il2) overexpressing the three IL-2R subunits. Cell culture was performed following the manufacturer's protocol. Cells were seeded at 100,000 cells/well in a 96-well plate, washed with FACS buffer, and preincubated with antibodies diluted in FACS buffer at the concentration of 10 nM for 20 min at 4° C., after which biotinylated human IL-2 (proteintech) at 2 nM was added for another 1 hour at 4° C. Cells were washed again with FACS buffer and stained with Streptavidin-PE (eBioscience) for 1 hour at 4° C. Dead cells were excluded from the analysis by using a fixable viability dye (cFluor780, eBioscience). Stained cells were analyzed on a LSR Fortessa flow cytometer (BD Biosciences). Final analysis and graphic output were performed with FlowJo v10.7.1 software (BD Biosciences) and GraphPad Prism version 8 (GraphPad Software).

[0307] The neutralizing potencies of monospecific anti-IL-2Rα, anti-IL-2Rβ and anti-γc antibodies are depicted in FIG. 2 Several clones greatly inhibited the human IL-2 binding to its receptor. Specifically, anti-IL-2Rα Abs 2, 8 and 10 and anti-IL-2Rβ Abs 15 and 17 potently blocked human IL-2 binding to its receptor. Interestingly, although no binding signal is detected with γc-specific clones, clone 28 moderately inhibits human IL-2 binding to its receptor.

D. Human-cynomolgous monkey IL2R subunit cross-reactivity testing

[0308] Monospecific monovalent and bivalent IL-2Rα-, IL-2Rβ- and IL-2Rγ-specific antibodies that were selected on human IL-2R subunits, were evaluated for their cross-reactivity in an ELISA. Human and cynomolgus monkey receptor subunits (Acrobiosystems, KactusBiosystems) were coated at 1 μg/mL in PBS (pH 7.4) in a Maxisorp plate (Nunc) and incubated overnight at 4° C. The plates were further washed with PBS-Tween pH 7.4 and incubated with 1% cascin/PBS-Tween blocking solution for 1 hour shaking at 400 rpm. Subsequently, the plate was washed three times with PBS-Tween pH 7.4, after which the test antibodies diluted in 0.1% casein/PBS-Tween were added to the plate and incubated for 1 hour. The plate was again washed three times, after which goat anti-human IgG Fc (HRP) detection antibody (abcam) was added to the plate and incubated for 30 min. The colouring reaction was performed with TMB (Sigma-Aldrich) and stopped with 0.5N H₂SO₄.

[0309] Absorbance was measured at 450 nm with the reference wavelength of 620 nm using spectrophotometer. Final analysis and graphic output were performed with GraphPad Prism version 8 (GraphPad Software). The dose-response binding curves were fit to a nonlinear regression model (log (agonist) vs. response with a variable slope (four parameters)).

[0310] The binding properties of monospecific monovalent and bivalent anti-IL-2Rα, anti-IL-2Rβ and anti-γc antibodies are shown in FIG. 3A, FIG. 3B and FIG. 3C. The lower affinity of some antibody clones for the cynomolgus monkey IL-2R subunits is more pronounced in monovalent or one-armed format. In bivalent format, only several clones have significantly lower affinity for the cyno IL-2R subunits than for their human counterpart. The binding properties of the monospecific monovalent and bivalent VHH hFc clones to the human and cyno IL-2R subunits are shown in the TABLE 2. Fold-change of more than 1.5 between EC50 (nM) for binding to human and cyno receptor subunits indicates minor/no cross-reactivity.

### Example 3: Construction bispecific and trispecific antibodies co-targeting the IL-2Rα, IL-2Rβ and cγ

### A. Construction Bispecific Antibodies Targeting the IL-2Rβ and γc:

[0311] 5 VHH clones specific for IL-2Rβ and 5 VHH clones specific for IL-2Rγ were selected and used to construct bispecific bivalent anti-IL-2Rβ/γc antibodies. Two VHH fragments were linked to a IgG1 backbone Fc region, while a (G₄S)₃ linker between the two VHH fragments and between the anti-IL-2Rβ VHH and the Fc region was used. The molecules comprised the amino acid substitutions L234A, L235A and P329G (LALA-PG) (EU numbering) in the immunoglobulin heavy chains, known to abrogate Fc-mediated effector functions. The Fc regions of the antibodies also included the mutations necessary for Fc domain heterodimerization by controlled Fab arm exchange (cFAE) (Labrijn et al. 2013. Proc Natl Acad Sci USA 110 (13): 5145-50; WO 2011/131746). In particular, the anti-IL-2Rβ/γc antibodies contained F405L CH3 domain mutation. Antibody molecules were produced by transient transfection in HEK293E cells and purified from cell supernatant by protein A affinity chromatography.

### B. Construction Trispecific Antibodies Targeting the IL-2Rα, IL-2β and IL-2Rγ:

[0312] 5 VHH clones specific for anti-IL-2Rα were produced as monospecific bivalent VHH-hFc fusion proteins (FIG. 4). The Fc portions of the antibodies comprised LALA-PG mutations and cFAE K409R CH3 domain mutation.

[0313] Trispecific anti-IL-2Rα/IL-2Rβ/γc antibodies were obtained using controlled Fab-arm exchange (cFAE) method described in Labrijn et al. 2013. Proc Natl Acad Sci USA 110 (13): 5145-5150 and WO 2011/131746. Monospecific bivalent anti-IL-2Rα antibodies containing K409R mutation and bispecific bivalent anti-IL-2Rβ/γc antibodies containing F405L mutation were mixed with a reducing agent at equimolar quantities. The resulting heterodimerisation of the Fc domains yielded trispecific monovalent anti-IL-2Rα/IL-2Rβ/γc antibodies (FIG. 4).

[0314] Protein integrity and heterodimerisation efficiency were analysed by an HPLC method using hydrophobic interaction chromatography (HIC) combined with ultraviolet spectrophotometry. HIC is a technique for separation of proteins based on their relative degree of hydrophobicity.

[0315] In HPLC-HIC the starting mobile phase contains a salting out agent. The high concentration of salt retains the protein by increasing hydrophobic interaction between solute and stationary phase. The bound proteins are eluted by decreasing the salt concentration. This is done using a gradient: starting with mobile phase A, high salt, gradually decreasing mobile phase A towards more mobile phase B, which contains very limited/no salt and if needed also organic solvent. The trispecific antibodies with asymmetric architecture are readily distinguished by this method: the retention time of the heterodimeric trispecific antibody is in between the parental homodimeric antibodies.

[0316] The HIC-HPLC was run through the MAbPac HIC-20 (ThermoFisher) column at a flow rate of 700 μL/min. The column temperature was kept at 30° C. and the sample temperature at 6° C. Stop time was set at 80 min. A sample having a total of 10 μg protein was run through HIC-HPLC. The antibodies were monitored by measuring their absorbance at 280 nm on the UV spectrum. The mobile phases included a Mobile Phase A and a Mobile Phase B. Mobile Phase A included 2.0 M ammonium sulphate and 100 mM sodium phosphate pH 7.1/H2O (75:25 (v/v)). Mobile Phase B included 100 mM sodium phosphate pH 7.0/H2O/isopropanol (60:20:20 (v/v/v)). The following gradient program was used:

| Time | A | B |
|---|---|---|
| min | % | % |
| 1.00 | 100.0 | 0.0 |
| 10.00 | 76.0 | 24.0 |
| 55.00 | 42.2 | 57.8 |
| 56.00 | 0.0 | 100.0 |
| 62.00 | 0.0 | 100.0 |
| 63.00 | 100.0 | 0.0 |
| 80.00 | 100.0 | 0.0 |

[0317] The trispecific antibodies with asymmetric architecture are readily distinguished by this method: the retention time of the heterodimeric trispecific antibody is in between the parental homodimeric antibodies. Heterodimerisation using cFAE method resulted in highly pure trispecific constructs. The purity and heterodimerisation efficiency were expressed as % main peak area; the results for the tested antibodies are summarised in (FIG. 5).

### Example 4: In vitro characterisation of antibodies targeting the IL-2Rα, IL-2Rβ and IL-2Rγ

[0318] Trispecific anti-IL-2Rα/IL-2Rβ/γc antibodies were tested for their ability to bind the human IL-2 receptor and to activate IL-2 signalling on human engineered cells expressing the three IL-2R subunits and on human PBMCs. Final analysis and graphic output were performed with FlowJo v10.7.1 software (BD Biosciences) and GraphPad Prism version 8 (GraphPad Software), respectively. The dose-response binding curves were fit to a nonlinear regression model (log (agonist) vs. response with a variable slope (four parameters)).

### A. Binding to HEK-Blue IL-2 Cells

[0319] The ability of trispecific anti-IL-2Rα/IL-2Rβ/γc antibodies to bind the human IL-2 receptor was analysed using the HEK-Blue IL-2 recombinant cell line (Invivogen, #hkb-il2) overexpressing the three IL-2R subunits. Cell culture was performed following the manufacturer's protocol. Cells were seeded at 100 000 cells/well in a 96-well plate, washed with FACS buffer, and incubated with antibodies diluted in FACS buffer at the concentration of 10 nM for 1 hour at 4° C., washed again with FACS buffer and stained with anti-human IgG-PE detection antibody (eBioscience) for 1 hour at 4° C. Dead cells were excluded from the analysis by using a fixable viability dye (eFluor780, eBioscience). Flow cytometric measurements were performed on a LSR Fortessa flow cytometer (BD Biosciences).

[0320] The cell binding properties of trispecific anti-IL-2Rα/IL-2Rβ/γc antibodies and their parental mono- and bispecific antibodies are shown in FIG. 6.

[0321] The cell binding properties of bispecific bivalent anti-IL-2Rβ/γc and monovalent trispecific anti-IL-2Rα/IL-2Rβ/γc antibodies were further assayed at multiple concentrations for cell binding on HEK-Blue IL-2 cells; the results are shown in FIG. 7A and FIG. 7B.

B. Interference with Human IL-2 Binding to its Receptor

[0322] The ability of trispecific anti-IL-2Rα/IL-2Rβ/γc antibodies to compete with the human IL-2 binding to its receptor was analysed using HEK-Blue IL-2 recombinant cell line (Invivogen, #hkb-il2) overexpressing the three IL-2R subunits. Cell culture was performed following the manufacturer's protocol. Cells were seeded at 100 000 cells/well in a 96-well plate, washed with FACS buffer, and preincubated with antibodies diluted in FACS buffer at the concentration of 10 nM for 20 min at 4° C., after which biotinylated human IL-2 (proteintech) at 2 nM was added for another 1 hour at 4° C. Cells were washed again with FACS buffer and stained with Streptavidin-PE (eBioscience) for 1 hour at 4° C. Dead cells were excluded from the analysis by using a fixable viability dye (eFluor780, eBioscience). Flow cytometric measurements were performed on a LSR Fortessa flow cytometer (BD Biosciences).

[0323] The neutralizing potencies of trispecific anti-IL-2Rα/IL-2Rβ/γc antibodies are depicted in FIG. 6. Several clones greatly inhibited the human IL-2 binding to its receptor. Specifically, trispecific antibodies that contain the strongest binding anti-IL-2Rα VHH 8 and 10 also induce the greatest inhibition of hIL-2 binding to its receptor.

C. Activation of pSTAT5 on HEK-Blue IL-2 cells

[0324] The potency of trispecific anti-IL-2Rα/IL-2Rβ/γc antibodies to induce IL-2 signalling was analysed by determining the level of STAT5 phosphorylated by HEK-Blue IL-2 recombinant cell line (Invivogen, #hkb-il2) in the presence of the antibodies. Cell culture was performed following the manufacturer's protocol. Cells were seeded at 200 000 cells/well in a 96-well plate in RPMI 0.1% BSA medium and treated with antibodies at a concentration of 50 nM for 1 hour at 4° C. Cells were further treated with IC Fixation buffer (eBioscience) for 15 min at room temperature, washed with FACS buffer, and incubated with BD Phosflow Perm Buffer III (BD Biosciences) for 30 min on ice. After washing with FACS buffer the cells were stained with anti-Stat5 (pY694)-PE detection antibody (BD Biosciences) overnight at 4° C. Dead cells were excluded from the analysis by using a fixable viability dye (eFluor780, eBioscience). Flow cytometric measurements were performed on a LSR Fortessa flow cytometer (BD Biosciences). The dose-response binding curves were fit to a nonlinear regression model (log (agonist) vs. response with a variable slope (four parameters)).

[0325] Results are depicted in FIG. 6. IL-2 signalling pathway is activated by the antibodies that contain both IL-2Rβ and IL-2Rγ VHH, but not by the monospecific anti-IL-2Rα antibodies. As such, pSTAT5 signal strength of trispecific anti-IL-2Rα/IL-2Rβ/γc clones depends mainly on the parental bispecific anti-IL-2Rα/β. These findings are expected because IL-2 signalling is proposed to occur via phosphorylation of IL-2Rβ and γc subunits, with IL-2Rα increasing the affinity of IL-2 for its receptor. Interestingly, pSTAT5 signal strength does not correlate with binding ability of the antibodies nor with their neutralization of human IL-2 potency.

[0326] Several clones were further tested at multiple concentrations in order to assay the antibody concentration that gives half-maximal response (EC50). Bispecific bivalent anti-IL-2Rα/IL-2Rβ and trispecific anti-IL-2Rα/IL-2Rβ/γc antibodies induce dose-dependent pSTAT5 activation of HEK-Blue IL-2 cells. For some bispecific clones, addition of anti-IL-2Rα VHH decreases the EC50 value, suggesting improved CD25 targeting (FIG. 8).

[0327] The potential of bispecific monovalent anti-IL-2Rβ/γc and trispecific anti-IL-2Rα/IL-2Rβ/γc antibodies to induce IL-2 signalling was further analysed at multiple concentrations using HEK-Blue IL-2 cells reading out STAT5 phosphorylation by flow cytometry. The results are shown in FIG. 9A and FIG. 9B. Several trispecific antibodies displayed a higher potency than the corresponding bispecific antibodies in this cell line assay, suggesting improved targeting of CD25 and the trimeric receptor.

[0328] The ability of bivalent trispecific anti-IL-2Rα/IL-2Rβ/γc antibody variants of tsVHH48 to induce pSTAT5 signalling via the human trimeric IL-2 receptor was analysed using a HEK-Blue cell line expressing the trimeric IL-2 receptor. The results are shown in FIG. 9E and the geometries of the antibodies are shown in FIG. 12.

D. Activation of pSTAT5 on Human PBMCs

[0329] Peripheral blood mononuclear cells (PBMCs) were isolated from human healthy donor buffy coat donations (supplied by the Red Cross Flanders Blood Service, Belgium) using a Ficoll-Paque gradient. The cells were cultured for 2 days at high cell density using the protocol for resetting T cells to original reactivity (Wegner et al., Blood 2015). On the day of the experiment, the PBMCs were seeded at 10×10⁶ cells/well in a 96-well plate in RPMI 0.1% BSA medium and treated with antibodies for 1 hour at 4° C. Cells were further treated with IC Fixation buffer (eBioscience) for 15 min at room temperature, washed with FACS buffer, and incubated with BD Phosflow Perm Buffer III (BD Biosciences) for 30 min on ice. After washing with FACS buffer the cells were stained overnight at 4° C. with following detection antibodies: anti-human CD3 APC-eFluor780, CD4 PerCP-cFluor710, CD127 PE, Foxp3 cFluor660 (eBioscience), CD8 FITC, Stat5 (pY694) Pacific Blue (BD Biosciences). CD25 staining was performed either with anti-human CD25 PE-Cy7 clone 4E3 (eBioscience) or clone 2A3 (BD Biosciences), depending on which IL-2Rα-specific VHH was used for treatment. Dead cells were excluded from the analysis by using a fixable viability dye (cFluor506, eBioscience). Flow cytometric measurements were performed on a LSR Fortessa flow cytometer (BD Biosciences). Next, monospecific tsVHH-48 geometry variants and anti-CD25-biparatopic tsVHH-48 variants (FIG. 12C, upper & lower panels) were tested for their ability to more selectively activate pSTAT5 in CD4+ Tregs versus NK cells. Amongst non-Treg cell types, NK cells express the higher levels of CD122. Frozen PBMCs were seeded in 96-well plates and rested for 1 hour. Cells were then stimulated with varying doses of tsVHH variants for 40 minutes at 37° C. Stimulation was stopped by fixing cells with paraformaldehyde followed by methanol permeabilization of the cells. Cells were stained for 1 hour at room temperature with the following antibodies: anti-CD3 (clone UCHT1), anti-CD4 (clone SK3), anti-CD8 (clone SK1), anti-CD19 (HIB19), anti-CD56 (clone NCAM16.21), anti-CD127 (clone A019D5), anti-CD25 (clone M-A251), anti-Foxp3 (clone 259D/C7), anti-pSTAT5 (pY694), and dead cells were excluded using a fixable viability dye. Cells were analysed by flow cytometry. The pSTAT5 induction data is represented in FIGS. 10B and 10C and in TABLES 10 and 11. TsVHH-48 geometry variants were identified with increased potency for Tregs versus NK cells as compared to IL-2 or parental ts VHH-48 (TABLE 10). TsVHH-48 variants were also identified with decreased efficacy (max. % pSTAT5) on NK cells versus Tregs as compared to IL-2 and tsVHH-48. Furthermore, particular anti-CD25-biparatopic ts VHH variants show increased potency compared to parental tsVHH-48 or IL-2 (TABLE 11).

### E. Preferential Treg Expansion in Human PBMC Assay

[0330] Trispecific anti-IL-2Rα/IL-2Rβ/γc antibodies were assayed for their ability to preferentially expand CD25+ Tregs in human PBMC culture. Peripheral blood mononuclear cells (PBMCs) were isolated from human healthy donor buffy coat donations (supplied by the Red Cross Flanders Blood Service, Belgium) and cultured at high density for 2 days in order to restore the reactivity of T cells (Romer et al. 2011, Wegner et al. 2015 and US20110082091). Cells were seeded at 200 000 cells/well in 96-well U-bottom culture plates in RPMI-1640 culture medium (Gibco) supplemented with 10% FBS, 1% P/S, 2 mM L-Glutamine and freshly added 1:1000 B-mercaptoethanol. Cells were labelled with CFSE proliferation dye (Quah et al. 2007 Nature protocols) and stimulated with antibodies at different concentrations (100, 10, 1, 01 nM) for 4 days. Cells were stained with the following FACS antibodies: anti-human CD3 PerCP-VIO 700 (Miltenyi), CD4 BUV496, CD8 BUV805, CD56 BUV563 (BD Bioscience), FoxP3 APC, CD127 BV421, CD19 BV510, HLA-DR BV570 (BioLegend), CD69 PE-Cy7 (eBioscience). CD25 staining was performed either with anti-human CD25 PE-Cy7 clone 4E3 (eBioscience) or clone 2A3 (BD Biosciences), depending on which IL-2Rα-specific VHH was used for treatment. Dead cells were excluded from the analysis by using a fixable viability dye (eFluor780, eBioscience). Flow cytometric measurements were performed on a FACSymphony™ flow cytometer (BD Biosciences). Cell expansion was assessed by measuring CFSE proliferation profiles. TsVHH-48 demonstrates increased Treg selectivity and potency of inducing Treg proliferation versus wild-type IL-2 and the bsVHH-11 used to construct TsVHH-48.

### Results are Depicted in FIG. 11.

[0331] Next to the monovalent trispecific geometry shown in FIG. 4, additional geometries were designed (FIG. 12A and FIG. 12B and FIG. 12C) to further modify the selectivity and/or potency of IL-2 signaling on Tregs, via increasing for example the number of epitopes for one of the IL-2R chains bound by the antibody from 1 to 2 and/or by increasing the number of CD25 binding moieties within the trispecific Abs. Varying geometries may also be tested for increased yield upon transfecting mammalian cells such as HEK293 cells as well as for case of production and purification. In particular, molecules with a symmetric architecture may be tested.

### Example 5: In Vivo Characterization of tsVHH48 in Acute Graft-Vs-Host-Disease Model

[0332] The agonistic anti-IL-2R antibodies were further evaluated for their ability to potentiate human Treg function in vivo. A model of xenogeneic graft-versus-host disease (GvHD) was used, which was induced by the infusion of human peripheral blood mononuclear cells (hPBMCs) into immuno-compromised NOD/Scid/IL2Rg−/−(NSG) mice. NSG mice have defective cytokine signaling and lack functional T, B and NK cells, allowing very efficient engraftment of human T cells upon i.v. injection of PBMCs. After hPBMC transfer, recipient mice develop xenogeneic GVHD, due to the activity of human cytotoxic T lymphocytes against murine tissues (Shultz, Nat Rev Immunol. 2012). Preferential Treg expansion would attenuate the disease. This model can thus be used to demonstrate the therapeutic efficacy of agonistic anti-Treg IL-2R trimer antibodies.

[0333] Male and female NSG mice between 6 to 10 weeks of age (bred and housed in specific pathogen-free facilities of the University of Leuven unless otherwise stated), were infused with 2×10E7 hPBMCs on day 0. These hPBMC were isolated from healthy blood donors' buffy coats (Belgian Red Cross) using density centrifugation (LSM MP Biomedicals, Germany). The GvH disease activity was evaluated by scoring the mice thrice per week. This score incorporated 6 clinical parameters, each one incrementing: 0 (no symptom), 1 (mild), or 2 (maximum). Parameters included are: weight loss (1 for >10% and 2 for >20%), posture (hunching), mobility, anemia, fur texture, and skin integrity. Mice reaching a disease activity score of 8 or those losing more than 20% of their initial weight were sacrificed in agreement with the KUL ethical committee procedure. All experimental procedures were approved by the Animal Care and Animal Experiments Ethical Committee of KU Leuven.

[0334] Mice were injected intraperitoneally with 1 μg, 0.3 μg or 0.1 μg ts VHH48 (100 μl, diluted in DPBS 1X), from day 2 and every 4 days for a total of 4 injections. As a control group, mice were intraperitoneally injected with 100 μl of PBS (Gibco) following the same scheme injection.

[0335] To evaluate the human leucocyte engraftment and the modulation of T and NK cell subsets over time, weekly immunophenotyping on blood was performed. Around 150 μl of blood was individually collected into 50 μl of heparin from day 7. Upon red blood cell lysis, each sample was stained with a live dead marker (live dead blue, thermofisher) for 20 min at 4° C. Then, the cells were blocked with Human BD Fc Block (BD) for 10 min at 4° C. and stained with the following antibodies: anti-mCD45 (clone 30-F11, BD), anti-hCD45 (clone HI30, Biolegend), anti-hCD3 (clone UCHT1, Biolegend), anti-hCD4 (clone OKT4, Sony), anti-hCD8 (clone SK1, Biolegend), anti-Ki67 (clone RUO, BD), anti-hCD127 (clone eBioRDR5, Ebioscience), anti-hFOXP3 (clone 206D, Biolegend), anti-hCD56 (clone 5.1H11, Sony), anti-hCD45RO (clone UCHL1, BD), anti-hCD45RA (clone GRT22, Invitrogen), anti-hCD25 (clone BC96, Sony), anti-hCCR4 (L291H4, Biolegend). The engraftment of the human cells was calculated using % hCD45/(% mCD45+% hCD45) from the total alive (Live dead blue negative population) cells. Flow cytometry was performed on the high parameter spectral SONY ID 7000 and analyzed on FCS express v7 (De Novo software). All the graphs and statistical analyses were performed using GraphPad Prism software.

[0336] The survival and disease activity readouts are shown in FIG. 13A. The survival of the mice treated with tsVHH48 1 μg was lower than the PBS group (median survival 28 days and 34.5 days respectively) while survival increased for the doses 0.3 and 0.1 μg (median survival 38 and 37 days respectively). The weight loss (and disease activity readouts correlated with the survival trend: the 1 μg tsVHH48 group showed an earlier and faster decrease in weight while animals in the 0.3 μg and 0.1 μg groups kept their weight above animals from the PBS group. After day 14, disease activity for the 1 μg tsVHH48 group increased significantly above, (1 μg vs PBS, P=0.0024, Paired t-test) while the disease activity for the 0.3 μg and 0.1 μg groups were significantly below that of the PBS group (P=0.0002 and P=0.0146 respectively, Paired t-test).

[0337] To understand whether these differences were associated with a modulation of the effector or regulatory T cell population, we analyzed the frequency of these immune cell populations over time on blood (FIG. 13B). First, engraftment of human leukocytes (hCD45) was comparable between each group and the human CD45 population constituted mainly of T cells (>95% CD3+ cells,). Transient increases in NK T cell frequency was observed at early time points while frequencies of NK and NKT cells were comparable to or below the PBS group otherwise. A complete differentiation of T cells into effector memory T cells was observed for both CD4 and CD8 T cells without any major difference between the groups. With CD4 and CD8 T cells overall following the same pattern of expansion and attrition as the PBS group, CD4 T cells dominated the CD3+ T cells. The frequency of the Treg population (CD4+CD127-FOXP3+) was increased at day 7 and day 14 compared to the PBS group, with Treg numbers significantly higher for the 0.3 μg tsVHH48 dose group vs PBS group (p=0.0045). Hence the 0.3 μg and 0.1 μg dose groups seemed to increase the Treg frequency at the early timepoints (FIG. 13C).

TABLE 1
Binding characteristics of the selected clones.

| | | P.E. binding ELISA | | | | | | | | Sequence |
|---|---|---|---|---|---|---|---|---|---|---|
| | | (OD450 nm) | | P.E. Off-rate ranking SPR | | | | Competition | Epitope | analysis |
| | | human | mouse | huIL2R-a | | moIL2R-a | | SPR | binding SPR | CDR3 |
| Target | Clone ID | IL-2R | IL-2R | Rmax (Rus) | kd (1/s) | Rmax (Rus) | kd (1/s) | hIL-2:hIL-2RA | Epitope bin | Family ID |
| IL-2R | 12-MP05B12 | 2.136 | 0.936 | 585 | 2.22E−04 | 567 | 5.47E−04 | | H | 4 |
| alpha | 11-MP05H04 | 2.221 | 0.163 | 202 | 1.20E−03 | 533 | 1.63E−03 | no | H | 4 |
| (CD25) | 4-MP01F04 | 2.493 | 0.046 | 690 | 2.58E−04 | 18 | 2.56E−01 | no | H | 6 |
| | 1-MP01H01 | 1.705 | 0.048 | 127 | 2.29E−02 | 8 | N/A | no | H | 6 |
| | 9-MP05G01 | 2.353 | 0.047 | 570 | 1.69E−04 | 119 | 4.42E−02 | no | H | 7 |
| | 6-MP01G05 | 1.794 | 0.046 | 123 | 2.06E−02 | 10 | N/A | no | H | 10 |
| | 3-MP01E03 | 2.535 | 0.046 | 413 | 7.99E−04 | 9 | N/A | no | H | 14 |
| | 5-MP01F05 | 2.620 | 0.046 | 312 | 4.20E−04 | 9 | N/A | yes | I | 9 |
| | 2-MP01A02 | 2.615 | 0.046 | 847 | 1.53E−03 | 9 | N/A | yes | I | 2 |
| | 8-MP01C12 | 2.531 | 0.045 | 819 | 3.83E−04 | 8 | N/A | yes | I | 3 |
| | 10-MP05F03 | 2.465 | 0.054 | 780 | 6.39E−04 | 329 | 1.05E−01 | yes | J | 12 |
| IL-2R | 16-MP02B08 | 1.379 | 0.048 | 135 | 1.41E−04 | 3 | N/A | | A | 1 |
| beta | 20-MP03F10 | 0.497 | 0.048 | 52 | 5.95E−04 | 7 | N/A | | A | 3 |
| (CD122) | 24-MP06E05 | 0.355 | 0.046 | 315 | 4.71E−04 | 9 | N/A | | A | 5 |
| | 22-MP03F12 | 0.781 | 0.048 | 167 | 4.19E−04 | 4 | N/A | | A | 33 |
| | 15-MP02E06 | 0.581 | 0.048 | 88 | 1.69E−03 | 3 | N/A | | A | 38 |
| | 18-MP03C03 | 0.405 | 0.048 | 125 | 5.94E−04 | 14 | N/A | | ND | 34 |
| | 26-MP06A07 | 1.027 | 0.048 | 451 | 3.63E−04 | 46 | 8.17E−03 | | B | 20 |
| | 23-MP06F03 | 0.540 | 0.047 | 467 | 1.05E−03 | 29 | 1.93E−01 | | B | 20 |
| | 19-MP03F08 | 0.245 | 0.049 | 387 | 2.96E−04 | 5 | N/A | | C | 9 |
| | 17-MP02C09 | 1.205 | 0.047 | 100 | 8.48E−04 | −4 | N/A | | ND | 12 |
| IL-2R | 34-MP04A12 | 1.299 | 3.599 | 323.31 | 3.33E−04 | 342.33 | 8.09E−03 | | D | 1 |
| gamma | 28-MP04D02 | 0.782 | 0.054 | 166.11 | 8.80E−03 | 30.94 | 3.196−01 | | D | 1 |
| (CD132) | 38-MP07A11 | 1.307 | 0.173 | 59.76 | 2.35E−03 | 215.77 | 1.49E−02 | | D | 1 |
| | 36-MP07F02 | 0.896 | 0.060 | 63.96 | 3.31E−03 | 112.27 | 7.47E−02 | | D | 1 |
| | 37-MP07F09 | 1.806 | 1.487 | 97.14 | 1.26E−03 | 309.78 | 7.00E−03 | | D | 1 |
| | 31-MP04E03 | 0.706 | 0.495 | 169.31 | 8.43E−02 | 27.1 | 2.83E−01 | | F | 2 |
| | 32-MP04A08 | 0.407 | 0.050 | 256.29 | 6.16E−02 | 9.53 | N/A | | G | 3 |
| | 27-MP04G01 | 0.362 | 0.048 | 96.63 | 1.31E−03 | 9.52 | N/A | | E | 4 |
| | 35-MP07G01 | 0.134 | 0.045 | −1.24 | N/A | 5.31 | N/A | | E | 5 |
| | 29-MP04H02 | 0.157 | 0.050 | 104.01 | 6.25E−03 | 10.31 | N/A | | E | 7 |

TABLE 2
Cross-reactivity of the monospecific VHH-hFe clones binding the
three IL-2 receptor subunits CD25, CD122 and CD122.
Results from a binding ELISA on human and
cynomolgus IL-2R subunits.
NB: no binding; NC: not cross-reactive.

| | | | | BIVALENT | | | MONOVALENT | | |
|---|---|---|---|---|---|---|---|---|---|
| | | | | EC50 values (nM) | | | EC50 values (nM) | | |
| | | | CDR3 | Human | Cyno | | Human | Cyno | |
| IL-2R | | | family | IL-2R | IL-2R | Fold | IL-2R | IL-2R | Fold |
| subunit | Clone ID | CDR3 sequence | ID | subunit | subunit | change | subunit | subunit | change |
| CD25 | 1-MP01H01 | DNIPLSSDVAATATEYDY | 6 | 0.052 | 0.061 | 1.2 | 0.478 | 0.498 | 1.0 |
| | 2-MP01A02 | ATSYDSIRSGS | 2 | 0.038 | 0.043 | 1.1 | 0.074 | 0.096 | 1.3 |
| | 3-MP01E03 | TASSYSTYEANYNY | 14 | 0.057 | 0.106 | 1.9 | 0.086 | 1.149 | 13.4 |
| | 4-MP01F04 | DNIPLSSDMRPTATEYDY | 6 | 0.053 | 0.056 | 1.1 | 0.077 | 0.074 | 1.0 |
| | 5-MP01F05 | DRTGVGTNDYNY | 9 | 0.060 | 0.095 | 1.6 | 0.088 | 0.136 | 1.5 |
| | 6-MP01G05 | DSIPLSSDMSPTATEYGY | 10 | 0.056 | 0.050 | 0.9 | 0.270 | 0.317 | 1.2 |
| | 7-MP01G08 | DSIRLRSDVTRIPLEYDY | 11 | 0.072 | 0.067 | 0.9 | 0.173 | 0.133 | 0.8 |
| | 8-MP01C12 | ATSYTSIRGAP | 3 | 0.051 | 0.054 | 1.1 | 0.065 | 0.069 | 1.1 |
| | 9-MP05G01 | DPLSLTSDWRVDELSS | 7 | 0.065 | 0.062 | 1.0 | 0.078 | 0.074 | 1.0 |
| | 10-MP05F03 | RDGGVVAGSRSSAQYNY | 12 | 0.061 | 0.060 | 1.0 | 0.105 | 0.098 | 0.9 |
| | 11-MP05H04 | DRLGSQGRYASAWWRSGDMDL | 4 | 0.093 | 0.110 | 1.2 | 0.378 | 1.246 | 3.3 |
| | 12-MP05B12 | DRLGSRGAYVPIWWRSSDMDL | 4 | 0.074 | 0.084 | 1.1 | 0.130 | 1.100 | 8.5 |
| | 13-MP05E12 | ARERATWAYSEDDCDY | 1 | 0.049 | 0.051 | 1.0 | 0.089 | 0.095 | 1.1 |
| | 92-MP05C07 | YTYSGSFYSTVKTHHDEYRY | 15 | 0.047 | NB | NC | | | |
| CD122 | 15-MP02E06 | YSSSTYYPPTPARGRDY | 38 | 0.209 | 0.895 | 4.3 | 0.640 | HIGH | NC |
| | 16-MP02B08 | ALKTITRGQNDYSY | 1 | 0.245 | 0.230 | 0.9 | 0.215 | 0.280 | 1.3 |
| | 17-MP02C09 | DSWGGDDY | 12 | 0.124 | 0.184 | 1.5 | 0.148 | 0.495 | 3.3 |
| | 18-MP03C03 | VDAYGCSLVQPTTYDF | 34 | 0.294 | 0.300 | 1.0 | 0.373 | HIGH | NC |
| | 19-MP03F08 | DRRPMGSRSYFEPTEYDD | 9 | 0.794 | 0.603 | 0.8 | 0.670 | 0.953 | 1.4 |
| | 20-MP03F10 | ARGLPVTPLGDIIY | 3 | 0.218 | NB | NC | 0.197 | NB | NC |
| | 22-MP03F12 | TRAIGWTARWITTDFDF | 33 | 0.124 | 0.122 | 1.0 | 0.092 | 0.156 | 1.7 |
| | 23-MP06F03 | NTDYFQIKSLDANT | 20 | 0.125 | 0.157 | 1.3 | 0.174 | 0.260 | 1.5 |
| | 24-MP06E05 | DGPPYSGTYYRYDTYDY | 5 | 0.191 | 0.265 | 1.4 | 0.206 | 0.657 | 3.2 |
| | 26-MP06A07 | NTDYFQIRSLDLNT | 20 | 0.117 | 0.138 | 1.2 | 0.086 | 0.102 | 1.2 |
| | 115-MP02E01 | SPRGFYGPGNALYDY | 29 | 0.060 | 0.060 | 1.0 | | | |
| | 126-MP02A03 | YDSSTFYPPTPARGIAD | 36 | 0.090 | 0.065 | 0.7 | | | |
| | 161-MP02C08 | GPYGDAAYRHGRIDS | 15 | 0.084 | 0.157 | 1.9 | | | |
| | 166-MP02H08 | DRNIKITADWSY | 8 | 0.085 | 0.105 | 1.2 | | | |
| | 168-MP02B09 | ARRGRAAVRSEGGYDF | 4 | 0.053 | 0.127 | 2.4 | | | |
| | 184-MP02E11 | PRSGRAGTRNQMDYEY | 22 | 0.059 | 0.074 | 1.3 | | | |
| | 189-MP02B12 | RMYSASTYYGDYDY | 25 | 0.053 | 0.066 | 1.3 | | | |
| | 193-MP02F12 | TDAVGWTTRWMTADFGF | 31 | 0.087 | 0.099 | 1.1 | | | |
| | 297-MP06A08 | ARDWFARNEYQYDY | 2 | 0.079 | 0.090 | 1.2 | | | |
| CD132 | 27-MP04G01 | GDGWSTYDY | 4 | 0.131 | 0.147 | 1.1 | 0.155 | 0.153 | 1.0 |
| | 28-MP04D02 | APTSFATTAYSGSNSYAY | 1 | 0.107 | 0.113 | 1.1 | 0.620 | 0.723 | 1.2 |
| | 29-MP04H02 | TFWIERATTPDIGQYAY | 7 | 0.179 | 0.260 | 1.4 | 0.683 | 0.534 | 0.8 |
| | 31-MP04E03 | DNPSTLATDYDN | 2 | NB | NB | NB | NB | NB | NB |
| | 32-MP04A08 | DSLPYGRPYYFQRSAGEYDY | 3 | 0.140 | NB | NC | HIGH | NB | NB |
| | 34-MP04A12 | APTSFATTAYSSSNSYAY | 1 | 0.117 | 0.112 | 1.0 | 0.132 | 0.158 | 1.2 |
| | 35-MP07G01 | GRYYNSAYDPSPGDFGS | 5 | NB | NB | NB | NB | NB | NB |
| | 36-MP07F02 | APTSFPTTAYSSSNSYAY | 1 | 0.117 | 0.121 | 1.0 | 0.145 | 0.222 | |
| | 37-MP07F09 | APTSFATTAYSSSNSYRY | 1 | 0.137 | 0.141 | 1.0 | 0.081 | 0.097 | 1.2 |
| | 38-MP07A11 | APTSFATTAYSSSNSYSY | 1 | 0.113 | 0.133 | 1.2 | 0.107 | 0.160 | 1.5 |

TABLE 3
Amino acid sequences of monovalent anti-CD25
(IL-2Rα), anti-CD122 (IL-2Rβ) and anti-CD132
(γc) VHHs. “ID” refers to
the SEQ ID NO as used herein.

| | | IL-2R | |
|---|---|---|---|
| ID | Name | subunit | Sequence |
| 1 | 1-MP01H01 | IL-2Rα | EVQLVESGGGLVQAGGSLRLSCAAS |
| | | | GRTFRTHNMGWFRRAPGKEREFVAA |
| | | | ISWNVDNTLYADSVKGRFTISRDNG |
| | | | RNMVYLQMNSLKPEDTAVYYCAADN |
| | | | IPLSSDVAATATEYDYWGQGTQVTV |
| | | | SS |
| | | | (SEQ ID NO: 1) |
| 2 | 2-MP01A02 | IL-2Rα | QVQLVESGGGLVQPGGSLRLSCATS |
| | | | GFTFRNNFMSWVRQAPGKGLEWVST |
| | | | ISYGGESTTYAESVKGRFTISRDNA |
| | | | KNTLYLQMNNLKPEDTAVYYCAKAT |
| | | | SYDSIRSGSRGQGTQVTVSS |
| | | | (SEQ ID NO: 2) |
| 3 | 3-MP01E03 | IL-2Rα | QVQLVESGGGLVQAGGSLRLSCTAS |
| | | | GRTLSSYSMAWFRQAADKGREFVTA |
| | | | ISSSGVVTHVLDSVKGRFTISRDNA |
| | | | KNTVYLQMNSLQPEDTALYFCAGTA |
| | | | SSYSTYEANYNYWGQGTLVTVSS |
| | | | (SEQ ID NO: 3) |
| 4 | 4-MP01F04 | IL-2Rα | QVQLVESGGGLVQAGGSLRLSCAAS |
| | | | GGTFRTRNMGWFRRAPGKEREFVAA |
| | | | VSWNVDNKLYADSVKGRFTISRDNG |
| | | | RNMVYLQMNSLKPEDTAVYYCAADN |
| | | | IPLSSDMRPTATEYDYWGQGTQVTV |
| | | | SS |
| | | | (SEQ ID NO: 4) |
| 5 | 5-MP01F05 | IL-2Rα | EVQLVESGGGLVQAGGSLRLSCAAS |
| | | | IRAFTTWSMAWFRQAPGKEREYVAR |
| | | | INVSGSVTYYADFVKGRFTISRDNA |
| | | | KKTMYLEMNNLKPEDTALYYCAADR |
| | | | TGVGTNDYNYWGQGTQVTVSS |
| | | | (SEQ ID NO: 5) |
| 6 | 6-MP01G05 | IL-2Rα | QVQLQESGGGLVQAGGSLRLSCAAS |
| | | | GRTFSSYAMGWFRQAPGKEREFVAV |
| | | | ISWNVDNTEYTDSVKGRFTISRDND |
| | | | KNMVYLQMNSLKPEDTAVYYCAADS |
| | | | IPLSSDMSPTATEYGYWGQGTQVTV |
| | | | SS |
| | | | (SEQ ID NO: 6) |
| 7 | 07-MP01G08 | IL-2Rα | EVQLVESGGGLVQAGGSLRLSCAAS |
| | | | GRAFSMYNMGWFRQAPGKEREFVAA |
| | | | TGWSGANTPYADSVKGRFTISRDNT |
| | | | QNTVYLQMNSLKPEDTATYYCAADS |
| | | | IRLRSDVTRIPLEYDYWGQGTQVTV |
| | | | SS |
| | | | (SEQ ID NO: 7) |
| 8 | 8-MP01C12 | IL-2Rα | QVQLVESGGGLVQPGGSLRLSCATS |
| | | | GFTFSNNFMSWVRQAPGKGLEFVST |
| | | | ISYGGESTTYAEAVKGRFTISRDNA |
| | | | KNTLYLQMNNLKPEDTAIYYCAKAT |
| | | | SYTSIRGAPRGQGTQVTVSS |
| | | | (SEQ ID NO: 8) |
| 9 | 9-MP05G01 | IL-2Rα | EVQLVESGGGLVQAGGSLRLSCAAS |
| | | | GGSIYTYNMGWFRQAPGKEREFVAG |
| | | | TLWSGGDSVYADFAKGRFTLSRENA |
| | | | KNTLYLQMNSLKPEDTATYYCAIDP |
| | | | LSLTSDWRVDELSSWGKGTLVTVSS |
| | | | (SEQ ID NO: 9) |
| 10 | 10-MP05F03 | IL-2Rα | QVQLVESGGGLVQAGGSLRLSCAAS |
| | | | GIPFDNYAMGWFRQAPGKEREFVAA |
| | | | RDLEGIITRYGDSVKGRFTISRGNA |
| | | | KNTVFLQMNSLKPEDTAVYYCAARD |
| | | | GGVVAGSRSSAQYNYWGQGTQVTVS |
| | | | S |
| | | | (SEQ ID NO: 10) |
| 11 | 11-MP05H04 | IL-2Rα | QLQLVESGGGLVQAGGSLRLSCAAS |
| | | | GLTFEGYAIGWFRQAPGKEREGVSY |
| | | | ITGSDGTTYYINSVKGRFTISSDNA |
| | | | KSTVYLQMNTLKPEDTAVYYCAVDR |
| | | | LGSQGRYASAWWRSGDMDLWGKGTQ |
| | | | VTVSS |
| | | | (SEQ ID NO: 11) |
| 12 | 12-MP05B12 | IL-2Rα | QVQLVESGGGLVQAGGSLRLSCAAS |
| | | | GFTFDGYAIGWFRQAPGKEREGVSY |
| | | | ITGSDGSTYYADSVKGRFTISSNNA |
| | | | KNTVYLHMNSLKPDDAAVYYCAIDR |
| | | | LGSRGAYVPIWWRSSDMDLWGKGTL |
| | | | VTVSS |
| | | | (SEQ ID NO: 12) |
| 13 | 13-MP05E12 | IL-2Rα | QVQLQESGGGLVQAGDSLRLSCAAS |
| | | | GFNFGWHAMGWFRQAPGKEREFVAT |
| | | | ITWTGRDTYYADSVRGRFTISKDNA |
| | | | KDTLFLQMNSLRPDDTGVYYCAKAR |
| | | | ERATWAYSEDDCDYWGQGTQVTVSS |
| | | | (SEQ ID NO: 13) |
| 14 | 14-MP02C03 | IL-2Rβ | EVQLVESGGGLVQTGGSLRLSCAAS |
| | | | GSQFINDVMGWYRQVPGKQRELVAD |
| | | | MDDTGSTEYADSVKGRFTILRDSVK |
| | | | NTAYLQMSNLKPEDTGVYYCKAGLW |
| | | | IKGRHFDYWGQGTQVTVSS |
| | | | (SEQ ID NO: 14) |
| 15 | 15-MP02E06 | IL-2Rβ | QVQLVESGGGSVQPGGSLRLSCAAS |
| | | | GFTFSNYAMSWVRQAPGKGLEWVAS |
| | | | ITGFGRGTDYADSVKGRFTISRDNA |
| | | | EDTLYLQMNSLKPEDTAVYYCAKYS |
| | | | SSTYYPPTPARGRDYRGQGTQVTVS |
| | | | S |
| | | | (SEQ ID NO: 15) |
| 16 | 16-MP02B08 | IL-2Rβ | EVQLVESGGGLVQAGGSLRLSCAAS |
| | | | GRAIENYPVGWFRQAPGKEREFVAA |
| | | | ITWISGSTLYADSVKGRFTISRDNA |
| | | | KNTVYLQMSSLKPEDTALYYCAAAL |
| | | | KTITRGQNDYSYWGQGTQVTVSS |
| | | | (SEQ ID NO: 16) |
| 17 | 17-MP02C09 | IL-2Rβ | QVQLQESGGGLVQAGGSLRLSCVAS |
| | | | GSVSSINGMAWYRQGADNQRVLVAA |
| | | | ISRVGNTAYGDSVKGRFTISRQNAR |
| | | | NTVYLQMNSLKPEDTAVYYCNADSW |
| | | | GGDDYWGQGTQVTVSS |
| | | | (SEQ ID NO: 17) |
| 18 | 18-MP03C03 | IL-2Rβ | QVQLVESGGGLVQPGGSLRLSCAIS |
| | | | GGTLDSYGIGWVRQAPGKQREGVSC |
| | | | MSRSDDRTYYADSVKGRFTISKDSA |
| | | | KNTVYLQMTSLKPEDTAVYYCAAVD |
| | | | AYGCSLVQPTTYDFWGLGTQVTVSS |
| | | | (SEQ ID NO: 18) |
| 19 | 19-MP03F08 | IL-2Rβ | EVQLVESGGGLVQTGGSLRLSCAAS |
| | | | GGTFSRDAMAWFRQVPGKEREFVAL |
| | | | ISWSGATTNYADSVKGRFAISRDNG |
| | | | KNTVYLQMNRLKPADTAIYYCAADR |
| | | | RPMGSRSYFEPTEYDDWGQGTQVTV |
| | | | SS |
| | | | (SEQ ID NO: 19) |
| 20 | 20-MP03F10 | IL-2Rβ | EVQLVESGGGLVQAGGSLRLSCAAS |
| | | | GRDFSSYAMGWFRQAPGKEREFVVA |
| | | | ITWTKRSTDFPDSVKGRFTISRDNA |
| | | | KNTVYLDMNSLKPEDTAVYYCASAR |
| | | | GLPVTPLGDIIYWGEGTLVTVSS |
| | | | (SEQ ID NO: 20) |
| 21 | 21-MP03A12 | IL-2Rβ | EVQLVESGGGLVQAGGSLRLSCAAS |
| | | | GRTFSINAMGWFRQAPGKEREFVAA |
| | | | ISRSGGSTVYVDGVKGRFTISRDNA |
| | | | KNTVYLQMNSLEPEDTAVYYCAATM |
| | | | AVGWTTRWRTADFDSWGQGTQVTVS |
| | | | S |
| | | | (SEQ ID NO: 21) |
| 22 | 22-MP03F12 | IL-2Rβ | EVQLVESGGGLVQAGGSLRLSCAAS |
| | | | GSIFSINAMAWFRQVPGMERELVAA |
| | | | ISRDGGASVYRDSVKGRFTISRDNS |
| | | | KNTVYLQMNTLKPEDTAIYVCAATR |
| | | | AIGWTARWITTDFDFWGQGTQVTVS |
| | | | S |
| | | | (SEQ ID NO: 22) |
| 23 | 23-MP06F03 | IL-2Rβ | QVQLVESGGGLVQAGGSLRLSCAVS |
| | | | GDVFVRYTMAWFRQAPGKEREFVAS |
| | | | VTDSGRTTDYVHSVKGRFTVSRDNA |
| | | | KNTVYLQMNNLKPEDTAVYYCAANT |
| | | | DYFQIKSLDANTWGQGTQVTVSS |
| | | | (SEQ ID NO: 23) |
| 24 | 24-MP06E05 | IL-2Rβ | QVQLVESGGELVQGGASLRLSCAAS |
| | | | GRTFSNANMAWFRQAPEKEREFVAL |
| | | | ITWSSGSTLYADSVKGRFTISRDNA |
| | | | RKMVYLQMNSLKPEDTAVYYCAADG |
| | | | PPYSGTYYRYDTYDYWGQGTQVTVS |
| | | | S |
| | | | (SEQ ID NO: 24) |
| 25 | 25-MP06F05 | IL-2Rβ | QVQLVESGGGLVQTGDSLRLSCAAS |
| | | | GRSLDTTYIAWFRQAPGKERDFLAY |
| | | | ISPRFSHTWYADSVKGRFTISRNIA |
| | | | KRTVDLEMNSLEPEDTAVYYCAARE |
| | | | HSGSTAWEHYDHWGQGTQVTVSS |
| | | | (SEQ ID NO: 25) |
| 26 | 26-MP06A07 | IL-2Rβ | QVQLQESGGGLVQAGGSLRLSCAAS |
| | | | GDVFVRYTMAWFRQAPGKEREFVAS |
| | | | VTDSGRTTEYVDSVKGRFTVSRDNA |
| | | | KNTAYLQMNNLKPEDTAIYYCAANT |
| | | | DYFQIRSLDLNTWGQGTQVTVSS |
| | | | (SEQ ID NO: 26) |
| 27 | 27-MP04G01 | IL-2Rγ | QVQLVESGGGLVQAGGSLTLSCAAP |
| | | | GRTFGTDVVGWFRQAPGKEREFVAS |
| | | | ISRSGDGIYYDDSVKGRFTISRNNA |
| | | | WNTVNLQMNSLKVEDTAVYYCAAGD |
| | | | GWSTYDYWGQGTQVTVSS |
| | | | (SEQ ID NO: 27) |
| 28 | 28-MP04D02 | IL-2Rγ | QVQLVESGGGLVQAGGSLRLSCAAS |
| | | | GRTLSRYAMGWFRQAPGKEREFVTA |
| | | | NSWGGDTYYADSVQGRFTFSRDNAK |
| | | | NTVYLQMNSLQPEDTAVYYCAAAPT |
| | | | SFATTAYSGSNSYAYWGQGTQVTVS |
| | | | S |
| | | | (SEQ ID NO: 28) |
| 29 | 29-MP04H02 | IL-2Rγ | QVQLVESGGGLVQAGGSLRLACVAS |
| | | | GLTFDNYYMGWFRQAPGKEREFVAG |
| | | | IIWNGDHTAYADSIKGRFTISRDNA |
| | | | KNTAYLRMNSLKPEDTAVYYCAATF |
| | | | WIERATTPDIGQYAYWGQGTQVTVS |
| | | | S |
| | | | (SEQ ID NO: 29) |
| 30 | 30-MP04C03 | IL-2Rγ | EVQLVESGGGWVQDGGSLRLSCALS |
| | | | GRTFVRGIMGWFRQAPGKEREFVAR |
| | | | IIWHINSTRYADSVKGRFTISRDSA |
| | | | KNTMYLQMDSLRPEDTAVYYCAARD |
| | | | RYGSGNSLSPSAYDYWGQGTQVTVS |
| | | | S |
| | | | (SEQ ID NO: 30) |
| 31 | 31-MP04E03 | IL-2Rγ | QVQLVESGGGLVQAGGSLRLSCTGY |
| | | | GGAFTGYALGWFRQAPGKEREFVAR |
| | | | INWSGSFTYYASSVKGRFTISRDNA |
| | | | KNTMYLQMNNLKPEDTAVYYCAADN |
| | | | PSTLATDYDNWGQGTQVTVSS |
| | | | (SEQ ID NO: 31) |
| 32 | 32-MP04A08 | IL-2Rγ | QVQLVESGGGLVQAGGSLRLSCAAS |
| | | | GRTFGSTAVGWFRQVPGKEREFVSA |
| | | | INRSGSATTYADSVKGRFTISRDNA |
| | | | KNTVYLQMNSLTPEDTGVYYCAADS |
| | | | LPYGRPYYFQRSAGEYDYWGQGTQV |
| | | | TVSS |
| | | | (SEQ ID NO: 32) |
| 33 | 33-MP04C09 | IL-2Rγ | QLQLVESGGGLVQAGGSLRLSCAAS |
| | | | GPTFSRVAVGWFRQAPGKEREFVAA |
| | | | VNRPATMTKYADSVKGRFTVSRDNA |
| | | | KNTVDLQMNSMKPEDTAVYYCAADS |
| | | | VPYGRPYYWQTSAGDYDYWGQGTQV |
| | | | TVSS |
| | | | (SEQ ID NO: 33) |
| 34 | 34-MP04A12 | IL-2Rγ | QVQLVESGGGLVQAGSSLRLSCAAS |
| | | | GRTLSRLAMGWFRQAPGKEREFVAV |
| | | | NSWGGDTFYADSVEGRFTYSRDNAK |
| | | | SAVYLQMNSLQPEDTAVYYCAAAPT |
| | | | SFATTAYSSSNSYAYWGQGAQVTVS |
| | | | S |
| | | | (SEQ ID NO: 34) |
| 35 | 35-MP07G01 | IL-2Rγ | QVQLQESGGGLVQGGGSLRLSCAAS |
| | | | GGIFSSYAMGWFRQAPGKEREFVAA |
| | | | ISRSGRSTNYADSVKGRFTISRDNA |
| | | | KSTVYLQMNSLKPEETAVYYCAAGR |
| | | | YYNSAYDPSPGDFGSWGHGTQVTVS |
| | | | S |
| | | | (SEQ ID NO: 35) |
| 36 | 36-MP07F02 | IL-2Rγ | QVQLVESGGGLVQAGGSLRLSCAAS |
| | | | GRTLSRYAMGWFRQAPGSEREFVAA |
| | | | SSWGGDTFYADSVEGRFTFSRDNAK |
| | | | NAVYLQMNSLQPEDTAAYYCAAAPT |
| | | | SFPTTAYSSSNSYAYWGQGTQVTVS |
| | | | S |
| | | | (SEQ ID NO: 36) |
| 37 | 37-MP07F09 | IL-2Rγ | QVQLVESGGGLVQAGGSLRLSCAAS |
| | | | GRTLSRYAMGWFRQAPGKEREYVAI |
| | | | DSWGGDTFYADSVEGRFTFSRDNAK |
| | | | NEVYLQMNSLQPEDTAVYYCAGAPT |
| | | | SFATTAYSSSNSYRYWGQGTQVTVS |
| | | | S |
| | | | (SEQ ID NO: 37) |
| 38 | 38-MP07A11 | IL-2Rγ | QVQLVESGGGLVQAGGSLRLSCAAS |
| | | | GRSLSRDAMGWFRQAPGKEREFVAV |
| | | | MSWGGDTFYTDSVEGRFTFSRDNAK |
| | | | NAVYLEMNDLQPEDTAVYYCAAAPT |
| | | | SFATTAYSSSNSYSYWGRGTQVTVS |
| | | | S |
| | | | (SEQ ID NO: 38) |

TABLE 4
Sequences for CDRs and frameworks. The first column refers to the SEQ ID NO of the complete immunoglobulin single
variable domain (ISV), i.e. FR1-CDR1-FR2-CDR2-FR3-CDR3-FR4. CDR1, CDR2, CDR3 were determined according to Kontermann,
12010 (Kontermann & Dübel, 2010 Springer, Antibody Engineering).

| SEQ | | SEQ | | SEQ | | SEQ | | SEQ | | SEQ | | SEQ | | SEQ | |
|---|---|---|---|---|---|---|---|---|---|---|---|---|---|---|---|
| ID | Name | ID | FR1 | ID | CDR1 | ID | FR2 | ID | CDR2 | ID | FR3 | ID | CDR3 | ID | FR4 |
| 1 | 1- | 1868 | EVQLVESGGGLVQAGG | 467 | THNMG | 1869 | WFRRAP | 468 | AISWNVD | 1870 | RFTISRDNGRNMVY | 469 | DNIPLSSDVAA | 1871 | WGQ [symbol] |
| | MP01H | | SLRLSCAASGRTFR | | | | GKEREF | | NTLYADSV | | LQMNSLKPEDTAVY | | TATEYDY | | QVTV [symbol] |
| | 01 | | | | | | VA | | KG | | YCAA | | | | |
| 2 | 2- | 1872 | QVQLVESGGGLVQPG | 470 | NNFMS | 1873 | WVRQAP | 471 | TISYGGES | 1874 | RFTISRDNAKNTLYL | 472 | ATSYDSIRSGS | 1875 | RGQGT |
| | MP01A | | GSLRLSCATSGFTFR | | | | GKGLEW | | TTYAESVK | | QMNNLKPEDTAVY | | | | QVTVSS |
| | 02 | | | | | | VS | | G | | YCAK | | | | |
| 3 | 3- | 1876 | QVQLVESGGGLVQAG | 473 | SYSMA | 1877 | WFRQAA | 474 | AISSSGVV | 1878 | RFTISRDNAKNTVY | 475 | TASSYSTYEA | 1879 | WGQGT |
| | MP01E | | GSLRLSCTASGRTLS | | | | DKGREF | | THVLDSVK | | LQMNSLOPEDTALY | | NYNY | | LVTVSS |
| | 03 | | | | | | VT | | G | | FCAG | | | | |
| 4 | 4- | 1880 | QVQLVESGGGLVQAG | 476 | TRNMG | 1881 | WFRRAP | 477 | AVSWNVD | 1882 | RFTISRDNGRNMVY | 478 | DNIPLSSDMR | 1883 | WGQGT |
| | MP01F | | GSLRLSCAASGGTFR | | | | GKEREF | | NKLYADS | | LQMNSLKPEDTAVY | | PTATEYDY | | QVTVSS |
| | 04 | | | | | | VA | | VKG | | YCAA | | | | |
| 5 | 5- | 1884 | EVQLVESGGGLVQAGG | 479 | TWSM | 1885 | WFRQAP | 480 | RINVSGSV | 1886 | RFTISRDNAKKTMY | 481 | DRTGVGTNDY | 1887 | WGQGT |
| | MP01F | | SLRLSCAASIRAFT | | A | | GKEREY | | TYYADFVK | | LEMNNLKPEDTALY | | NY | | QVTVSS |
| | 05 | | | | | | VA | | G | | YCAA | | | | |
| 6 | 6- | 1888 | QVQLQESGGGLVQAG | 482 | SYAMG | 1889 | WFRQAP | 483 | VISWNVDN | 1890 | RFTISRDNDKNMVY | 484 | DSIPLSSDMSP | 1891 | WGQGT |
| | MP01G | | GSLRLSCAASGRTFS | | | | GKEREF | | TEYTDSVK | | LQMNSLKPEDTAVY | | TATEYGY | | QVTVSS |
| | 05 | | | | | | VA | | G | | YCAA | | | | |
| 7 | 07- | 1892 | EVQLVESGGGLVQAGGS | 485 | MYNMG | 1893 | WFRQAP | 486 | ATGWSGA | 1894 | RFTISRDNTQNTVYL | 487 | DSIRLRSDVTRI | 1895 | WGQ [symbol] |
| | MP01G0 | | LRLSCAASGRAFS | | | | GKEREFV | | NTPYADSV | | QMNSLKPEDTATYY | | PLEYDY | | QVTV [symbol] |
| | 8 | | | | | | A | | KG | | CAA | | | | |
| 8 | 8- | 1896 | QVQLVESGGGLVQPG | 488 | NNFMS | 1897 | WVRQAP | 489 | TISYGGES | 1898 | RFTISRDNAKNTLYL | 490 | ATSYTSIRGAP | 1899 | RGQ [symbol] |
| | MP01C | | GSLRLSCATSGFTFS | | | | GKGLEFV | | TTYAEAVK | | QMNNLKPEDTAIYY | | | | QVTV [symbol] |
| | 12 | | | | | | S | | G | | CAK | | | | |
| 9 | 9- | 1900 | EVOLVESGGGLVQAGG | 491 | TYNMG | 1901 | WFRQAP | 492 | GTLWSGG | 1002 | RFTLSRENAKNTLY | 493 | DPLSLTSDWR | 1903 | WGKGT |
| | MP05G | | SLRLSCAASGGSIY | | | | GKEREF | | DSVYADF | | LQMNSLKPEDTATY | | VDELSS | | LVTVSS |
| | 01 | | | | | | VA | | AKG | | YCAI | | | | |
| 10 | 10- | 1904 | QVQLVESGGGLVQAG | 494 | NYAMG | 1905 | WFRQAP | 495 | ARDLEGIIT | 1906 | RFTISRGNAKNTVF | 496 | RDGGVVAGS | 1907 | WGQ [symbol] |
| | MP05F | | GSLRLSCAASGIPFD | | | | GKEREF | | RYGDSVK | | LQMNSLKPEDTAVY | | RSSAQYNY | | QVTV [symbol] |
| | 03 | | | | | | VA | | G | | YCAA | | | | |
| 11 | 11- | 1908 | QLQLVESGGGLVQAGG | 497 | GYAIG | 1909 | WFRQAP | 498 | YITGSDGT | 1910 | RFTISSDNAKSTVYL | 499 | DRLGSQGRYA | 1911 | WGKY |
| | MP05H | | SLRLSCAASGLTFE | | | | GKEREG | | TYYINSVK | | QMNTLKPEDTAVYY | | SAWWRSGDM | | QVTVSS |
| | 04 | | | | | | VS | | G | | CAV | | DL | | |
| 12 | 12- | 1912 | QVQLVESGGGLVQAG | 500 | GYAIG | 1913 | WFRQAP | 501 | YITGSDGS | 1914 | RFTISSNNAKNTVYL | 502 | DRLGSRGAYV | 1915 | WGKGT |
| | MP05B | | GSLRLSCAASGFTFD | | | | GKEREG | | TYYADSV | | HMNSLKPDDAAVY | | PIWWRSSDMD | | LVTVSS |
| | 12 | | | | | | VS | | KG | | YCAI | | L | | |
| 13 | 13- | 1916 | QVQLQESGGGLVQAGD | 503 | WHAM | 1917 | WFRQAP | 504 | TITWTGRD | 1918 | RFTISKDNAKDTLFLQ | 505 | ARERATWAYS | 1919 | WGQGT |
| | MP05E1 | | SLRLSCAASGFNFG | | G | | GKEREFV | | TYYADSVR | | MNSLRPDDTGVYYC | | EDDCDY | | QVTVSS |
| | 2 | | | | | | A | | G | | AK | | | | |
| 14 | 14- | 1920 | EVQLVESGGGLVQTGGS | 506 | NDVMG | 1921 | WYRQVP | 507 | DMDDTGST | 1922 | RFTILRDSVKNTAYL | 508 | GLWIKGRHFDY | 1923 | WGQGT |
| | MP02C0 | | LRLSCAASGSQFI | | | | GKQRELV | | EYADSVKG | | QMSNLKPEDTGVYY | | | | QVTVSS |
| | 3 | | | | | | A | | | | CKA | | | | |
| 15 | 15- | 1924 | QVQLVESGGGSVQPG | 509 | NYAMS | 1925 | WVRQAP | 510 | SITGFGRG | 1926 | RFTISRDNAEDTLYL | 511 | YSSSTYYPPT | 1927 | RGQGT |
| | MP02E | | GSLRLSCAASGFTFS | | | | GKGLEW | | TDYADSV | | QMNSLKPEDTAVYY | | PARGRDY | | QVTVSS |
| | 06 | | | | | | VA | | KG | | CAK | | | | |
| 16 | 16- | 1928 | EVQLVESGGGLVQAGG | 512 | NYPVG | 1929 | WFRQAP | 513 | AITWISGS | 1930 | RFTISRDNAKNTVY | 514 | ALKTITRGQN | 1931 | WGQ [symbol] |
| | MP02B | | SLRLSCAASGRAIE | | | | GKEREF | | TLYADSVK | | LQMSSLKPEDTALY | | DYSY | | QVTV [symbol] |
| | 08 | | | | | | VA | | G | | YCAA | | | | |
| 17 | 17- | 1932 | QVQLQESGGGLVQAG | 515 | INGMA | 1933 | WYRQGA | 516 | AISRVGNT | 1934 | RFTISRQNARNTVY | 517 | DSWGGDDY | 1935 | WGQ [symbol] |
| | MP02C | | GSLRLSCVASGSVSS | | | | DNQRVL | | AYGDSVK | | LQMNSLKPEDTAVY | | | | QVTV [symbol] |
| | 09 | | | | | | VA | | G | | YCNA | | | | |
| 18 | 18- | 1936 | QVQLVESGGGLVQPG | 518 | SYGIG | 1937 | WVRQAP | 519 | CMSRSDD | 1938 | RFTISKDSAKNTVYL | 520 | VDAYGCSLVQ | 1939 | WGL [symbol] |
| | MP03C | | GSLRLSCAISGGTLD | | | | GKQREG | | RTYYADS | | QMTSLKPEDTAVYY | | PTTYDF | | QVTVSS |
| | 03 | | | | | | VS | | VKG | | CAA | | | | |
| 19 | 19- | 1940 | EVQLVESGGGLVQTGG | 521 | RDAMA | 1941 | WFRQVP | 522 | LISWSGAT | 1942 | RFAISRDNGKNTVY | 523 | DRRPMGSRSY | 1943 | WGQGT |
| | MP03F | | SLRLSCAASGGTFS | | | | GKEREF | | TNYADSV | | LQMNRLKPADTAIY | | FEPTEYDD | | QVTVSS |
| | 08 | | | | | | VA | | KG | | YCAA | | | | |
| 20 | 20- | 1944 | EVOLVESGGGLVQAGG | 524 | SYAMG | 1945 | WFRQAP | 525 | AITWTKRS | 1946 | RFTISRDNAKNTVY | 526 | ARGLPVTPLG | 1947 | WGE [symbol] |
| | MP03F | | SLRLSCAASGRDFS | | | | GKEREF | | TDFPDSVK | | LDMNSLKPEDTAVY | | DIIY | | LVTV [symbol] |
| | 10 | | | | | | VV | | G | | YCAS | | | | |
| 21 | 21- | 1948 | EVQLVESGGGLVQAGGS | 527 | INAMG | 1949 | WFRQAP | 528 | AISRSGGS | 1950 | RFTISRDNAKNTVYL | 529 | TMAVGWTTRW | 1951 | WGQ [symbol] |
| | MP03A1 | | LRLSCAASGRTFS | | | | GKEREFV | | TVYVDGVK | | QMNSLEPEDTAVYY | | RTADFDS | | QVTVSS |
| | 2 | | | | | | A | | G | | CAA | | | | |
| 22 | 22- | 1952 | EVQLVESGGGLVQAGG | 530 | INAMA | 1953 | WFRQVP | 531 | AISRDGGA | 1954 | RFTISRDNSKNTVY | 532 | TRAIGWTARW | 1955 | WGQGT |
| | MP03F | | SLRLSCAASGSIFS | | | | GMEREL | | SVYRDSV | | LQMNTLKPEDTAIY | | ITTDFDF | | QVTVSS |
| | 12 | | | | | | VA | | KG | | VCAA | | | | |
| 23 | 23- | 1956 | QVQLVESGGGLVQAG | 533 | RYTMA | 1957 | WFRQAP | 534 | SVTDSGR | 1958 | RFTVSRDNAKNTVY | 535 | NTDYFQIKSLD | 1959 | WGQGT |
| | MP06F | | GSLRLSCAVSGDVFV | | | | GKEREF | | TTDYVHSV | | LQMNNLKPEDTAVY | | ANT | | QVTVSS |
| | 03 | | | | | | VA | | KG | | YCAA | | | | |
| 24 | 24- | 1960 | QVQLVESGGELVQGGA | 536 | NANMA | 1961 | WFRQAP | 537 | LITWSSGS | 1962 | RFTISRDNARKMVY | 538 | DGPPYSGTYY | 1963 | WGQGT |
| | MP06E | | SLRLSCAASGRTFS | | | | EKEREFV | | TLYADSVK | | LQMNSLKPEDTAVY | | RYDTYDY | | QVTVSS |
| | 05 | | | | | | A | | G | | YCAA | | | | |
| 25 | 25- | 1964 | QVQLVESGGGLVQTGDS | 539 | TTYIA | 1965 | WFRQAP | 540 | YISPRFSHT | 1966 | RFTISRNIAKRTVDLE | 541 | REHSGSTAWE | 1967 | WGQGT |
| | MP06F0 | | LRLSCAASGRSLD | | | | GKERDFL | | WYADSVK | | MNSLEPEDTAVYYC | | HYDH | | QVTVSS |
| | 5 | | | | | | A | | G | | AA | | | | |
| 26 | 26- | 1968 | QVQLQESGGGLVQAG | 542 | RYTMA | 1969 | WFRQAP | 543 | SVTDSGR | 1970 | RFTVSRDNAKNTAY | 544 | NTDYFQIRSLD | 1971 | WGQGT |
| | MP06A | | GSLRLSCAASGDVFV | | | | GKEREF | | TTEYVDSV | | LQMNNLKPEDTAIY | | LNT | | QVTVSS |
| | 07 | | | | | | VA | | KG | | YCAA | | | | |
| 27 | 27- | 1972 | QVQLVESGGGLVQAG | 545 | TDVVG | 1973 | WFRQAP | 546 | SISRSGDG | 1974 | RFTISRNNAWNTVN | 547 | GDGWSTYDY | 1975 | WGQ [symbol] |
| | MP04G | | GSLTLSCAAPGRTFG | | | | GKEREF | | IYYDDSVK | | LQMNSLKVEDTAVY | | | | QVTV [symbol] |
| | 01 | | | | | | VA | | G | | YCAA | | | | |
| 28 | 28- | 1976 | QVQLVESGGGLVQAG | 548 | RYAMG | 1977 | WFRQAP | 549 | ANSWGGD | 1978 | RFTFSRDNAKNTVY | 550 | APTSFATTAY | 1979 | WGQ [symbol] |
| | MP04D | | GSLRLSCAASGRTLS | | | | GKEREF | | TYYADSV | | LQMNSLQPEDTAVY | | SGSNSYAY | | QVT [symbol] |
| | 02 | | | | | | VT | | QG | | YCAA | | | | |
| 29 | 29- | 1980 | QVQLVESGGGLVQAG | 551 | NYYMG | 1981 | WFRQAP | 552 | GIIWNGDH | 1982 | RFTISRDNAKNTAY | 553 | TFWIERATTPD | 1983 | WGQGT |
| | MP04H | | GSLRLACVASGLTFD | | | | GKEREF | | TAYADSIK | | LRMNSLKPEDTAVY | | IGQYAY | | QVTVSS |
| | 02 | | | | | | VA | | G | | YCAA | | | | |
| 30 | 30- | 1984 | EVQLVESGGGWVQDGG | 554 | RGIMG | 1985 | WFRQAP | 555 | RIIWHINST | 1986 | FTISRDSAKNTMYLQ | 556 | RDRYGSGNSL | 1987 | WGQ [symbol] |
| | MP04C0 | | SLRLSCALSGRTFV | | | | GKEREFV | | RYADSVKG | | MDSLRPEDTAVYYC | | SPSAYDY | | QVTV [symbol] |
| | 3 | | | | | | A | | | | AA | | | | |
| 31 | 31- | 1988 | QVQLVESGGGLVQAG | 557 | GYALG | 1989 | WFRQAP | 558 | RINWSGSF | 1990 | RFTISRDNAKNTMY | 559 | DNPSTLATDY | 1991 | WGQ [symbol] |
| | MP04E | | GSLRLSCTGYGGAFT | | | | GKEREF | | TYYASSVK | | LQMNNLKPEDTAVY | | DN | | QVTVSS |
| | 03 | | | | | | VA | | G | | YCAA | | | | |
| 32 | 32- | 1992 | QVQLVESGGGLVQAG | 560 | STAVG | 1993 | WFRQVP | 561 | AINRSGSA | 1994 | RFTISRDNAKNTVY | 562 | DSLPYGRPYY | 1995 | WGQGT |
| | MP04A | | GSLRLSCAASGRTFG | | | | GKEREF | | TTYADSVK | | LQMNSLTPEDTGVY | | FQRSAGEYDY | | QVTVSS |
| | 08 | | | | | | VS | | G | | YCAA | | | | |
| 33 | 33- | 1996 | QLQLVESGGGLVQAGGS | 563 | RVAVG | 1997 | WFRQAP | 564 | AVNRPATM | 1998 | RFTVSRDNAKNTVDL | 565 | DSVPYGRPYY | 1999 | WGQGT |
| | MP04C0 | | LRLSCAASGPTFS | | | | GKEREFV | | TKYADSVK | | QMNSMKPEDTAVYY | | WQTSAGDYDY | | QVTVSS |
| | 9 | | | | | | A | | G | | CAA | | | | |
| 34 | 34- | 2000 | QVQLVESGGGLVQAGS | 566 | RLAMG | 2001 | WFRQAP | 567 | VNSWGGD | 2002 | RFTYSRDNAKSAVY | 568 | APTSFATTAY | 2003 | WGQGA |
| | MP04A | | SLRLSCAASGRTLS | | | | GKEREF | | TFYADSVE | | LQMNSLQPEDTAVY | | SSSNSYAY | | QVTVSS |
| | 12 | | | | | | VA | | G | | YCAA | | | | |
| 35 | 35- | 2004 | QVQLQESGGGLVQGG | 569 | SYAMG | 2005 | WFRQAP | 570 | AISRSGRS | 2006 | RFTISRDNAKSTVYL | 571 | GRYYNSAYDP | 2007 | WGHGT |
| | MP07G | | GSLRLSCAASGGIFS | | | | GKEREF | | TNYADSV | | QMNSLKPEETAVYY | | SPGDFGS | | QVTVSS |
| | 01 | | | | | | VA | | KG | | CAA | | | | |
| 36 | 36- | 2008 | QVQLVESGGGLVQAG | 570 | RYAMG | 2009 | WFRQAP | 573 | ASSWGGD | 2010 | RFTFSRDNAKNAVY | 574 | APTSFPTTAY | 2011 | WGQGT |
| | MP07F | | GSLRLSCAASGRTLS | | | | GSEREF | | TFYADSVE | | LQMNSLQPEDTAAY | | SSSNSYAY | | QVTVSS |
| | 02 | | | | | | VA | | G | | YCAA | | | | |
| 37 | 37- | 2012 | QVQLVESGGGLVQAG | 573 | RYAMG | 2013 | WFRQAP | 576 | IDSWGGD | 2014 | RFTFSRDNAKNEVY | 577 | APTSFATTAY | 2015 | WGQ [symbol] |
| | MP07F | | GSLRLSCAASGRTLS | | | | GKEREY | | TFYADSVE | | LQMNSLQPEDTAVY | | SSSNSYRY | | QVT [symbol] |
| | 09 | | | | | | VA | | G | | YCAG | | | | |
| 38 | 38- | 2016 | QVQLVESGGGLVQAG | 576 | RDAM | 2017 | WFRQAP | 579 | VMSWGGD | 2018 | RFTFSRDNAKNAVY | 580 | APTSFATTAY | 2019 | WGR [symbol] |
| | MP07A | | GSLRLSCAASGRSLS | | G | | GKEREF | | TFYTDSVE | | LEMNDLQPEDTAVY | | SSSNSYSY | | QVT [symbol] |
| | 11 | | | | | | VA | | G | | YCAA | | | | |

[symbol]

indicates data missing or illegible when filed

TABLE 5
Sequence of multispecific polypeptides.
“ID” refers to the SEQ ID NO as
used herein.

| ID | Name | Sequence |
|---|---|---|
| 249 | BsVHH-3 | QVQLVESGGGLVQAGGSLRLSCAASGRTFG |
| | (32x16) | STAVGWFRQVPGKEREFVSAINRSGSATTY |
| | SEQ ID | ADSVKGRFTISRDNAKNTVYLQMNSLTPED |
| | NO: 2020 | TGVYYCAADSLPYGRPYYFQRSAGEYDYWG |
| | | QGTQVTVSSGGGGSGGGGSGGGGSGSEVQL |
| | | VESGGGLVQAGGSLRLSCAASGRAIENYPV |
| | | GWFRQAPGKEREFVAAITWISGSTLYADSV |
| | | KGRFTISRDNAKNTVYLQMSSLKPEDTALY |
| | | YCAAALKTITRGQNDYSYWGQGTQVTVSSG |
| | | GGGSGGGGSGGGGSTVSSDKTHTCPPCPAP |
| | | EAAGGPSVFLFPPKPKDTLMISRTPEVTCV |
| | | VVDVSHEDPEVKFNWYVDGVEVHNAKTKPR |
| | | EEQYNSTYRVVSVLTVLHQDWLNGKEYKCK |
| | | VSNKALGAPIEKTISKAKGQPREPQVYTLP |
| | | PSRDELTKNQVSLTCLVKGFYPSDIAVEWE |
| | | SNGQPENNYKTTPPVLDSDGSFLLYSKLTV |
| | | DKSRWQQGNVFSCSVMHEALHNHYTQKSLS |
| | | LSPGK |
| 250 | BsVHH-4 | QVQLQESGGGLVQGGGSLRLSCAASGGIFS |
| | (35x16) | SYAMGWFRQAPGKEREFVAAISRSGRSTNY |
| | SEQ ID | ADSVKGRFTISRDNAKSTVYLQMNSLKPEE |
| | NO: 2021 | TAVYYCAAGRYYNSAYDPSPGDFGSWGHGT |
| | | QVTVSSGGGGSGGGGSGGGGSGSEVQLVES |
| | | GGGLVQAGGSLRLSCAASGRAIENYPVGWF |
| | | RQAPGKEREFVAAITWISGSTLYADSVKGR |
| | | FTISRDNAKNTVYLQMSSLKPEDTALYYCA |
| | | AALKTITRGQNDYSYWGQGTQVTVSSGGGG |
| | | SGGGGSGGGGSTVSSDKTHTCPPCPAPEAA |
| | | GGPSVFLEPPKPKDTLMISRTPEVTCVVDV |
| | | SHEDPEVKFNWYVDGVEVHNAKTKPREEQY |
| | | NSTYRVVSVLTVLHQDWLNGKEYKCKVSNK |
| | | ALGAPIEKTISKAKGQPREPQVYTLPPSRD |
| | | ELTKNQVSLTCLVKGFYPSDIAVEWESNGQ |
| | | PENNYKTTPPVLDSDGSFLLYSKLTVDKSR |
| | | WQQGNVFSCSVMHEALHNHYTQKSLSLSPG |
| | | K |
| 251 | BsVHH-5 | QVQLVESGGGLVQAGGSLRLSCAASGRTLS |
| | (36x16) | RYAMGWFRQAPGSEREFVAASSWGGDTFYA |
| | SEQ ID | DSVEGRFTFSRDNAKNAVYLQMNSLQPEDT |
| | NO: 2022 | AAYYCAAAPTSFPTTAYSSSNSYAYWGQGT |
| | | QVTVSSGGGGSGGGGSGGGGSGSEVQLVES |
| | | GGGLVQAGGSLRLSCAASGRAIENYPVGWF |
| | | RQAPGKEREFVAAITWISGSTLYADSVKGR |
| | | FTISRDNAKNTVYLQMSSLKPEDTALYYCA |
| | | AALKTITRGQNDYSYWGQGTQVTVSSGGGG |
| | | SGGGGSGGGGSTVSSDKTHTCPPCPAPEAA |
| | | GGPSVFLFPPKPKDTLMISRTPEVTCVVVD |
| | | VSHEDPEVKFNWYVDGVEVHNAKTKPREEQ |
| | | YNSTYRVVSVLTVLHQDWLNGKEYKCKVSN |
| | | KALGAPIEKTISKAKGQPREPQVYTLPPSR |
| | | DELTKNQVSLTCLVKGFYPSDIAVEWESNG |
| | | QPENNYKTTPPVLDSDGSFLLYSKLTVDKS |
| | | RWQQGNVFSCSVMHEALHNHYTQKSLSLSP |
| | | GK |
| 252 | BsVHH-6 | QVQLVESGGGLVQAGGSLTLSCAAPGRTFG |
| | (27x18) | TDVVGWFRQAPGKEREFVASISRSGDGIYY |
| | SEQ ID | DDSVKGRFTISRNNAWNTVNLQMNSLKVED |
| | NO: 2023 | TAVYYCAAGDGWSTYDYWGQGTQVTVSSGG |
| | | GGSGGGGSGGGGSGSQVQLVESGGGLVQPG |
| | | GSLRLSCAISGGTLDSYGIGWVRQAPGKQR |
| | | EGVSCMSRSDDRTYYADSVKGRFTISKDSA |
| | | KNTVYLQMTSLKPEDTAVYYCAAVDAYGCS |
| | | LVQPTTYDFWGLGTQVTVSSGGGGSGGGGS |
| | | GGGGSTVSSDKTHTCPPCPAPEAAGGPSVF |
| | | LFPPKPKDTLMISRTPEVTCVVVDVSHEDP |
| | | EVKFNWYVDGVEVHNAKTKPREEQYNSTYR |
| | | VVSVLTVLHQDWLNGKEYKCKVSNKALGAP |
| | | IEKTISKAKGQPREPQVYTLPPSRDELTKN |
| | | QVSLTCLVKGFYPSDIAVEWESNGQPENNY |
| | | KTTPPVLDSDGSFLLYSKLTVDKSRWQQGN |
| | | VFSCSVMHEALHNHYTQKSLSLSPGK |
| 253 | BsVHH-7 | QVQLVESGGGLVQAGGSLRLSCTGYGGAFT |
| | (31x18) | GYALGWFRQAPGKEREFVARINWSGSFTYY |
| | SEQ ID | ASSVKGRFTISRDNAKNTMYLQMNNLKPED |
| | NO: 2024 | TAVYYCAADNPSTLATDYDNWGQGTQVTVS |
| | | SGGGGSGGGGSGGGGSGSQVQLVESGGGLV |
| | | QPGGSLRLSCAISGGTLDSYGIGWVRQAPG |
| | | KQREGVSCMSRSDDRTYYADSVKGRFTISK |
| | | DSAKNTVYLQMTSLKPEDTAVYYCAAVDAY |
| | | GCSLVQPTTYDFWGLGTQVTVSSGGGGSGG |
| | | GGSGGGGSTVSSDKTHTCPPCPAPEAAGGP |
| | | SVFLFPPKPKDTLMISRTPEVTCVVVDVSH |
| | | EDPEVKFNWYVDGVEVHNAKTKPREEQYNS |
| | | TYRVVSVLTVLHQDWLNGKEYKCKVSNKAL |
| | | GAPIEKTISKAKGQPREPQVYTLPPSRDEL |
| | | TKNQVSLTCLVKGFYPSDIAVEWESNGQPE |
| | | NNYKTTPPVLDSDGSFLLYSKLTVDKSRWQ |
| | | QGNVFSCSVMHEALHNHYTQKSLSLSPGK |
| 254 | BsVHH-8 | QVQLVESGGGLVQAGGSLRLSCAASGRTFG |
| | (32x18) | STAVGWFRQVPGKEREFVSAINRSGSATTY |
| | SEQ ID | ADSVKGRFTISRDNAKNTVYLQMNSLTPED |
| | NO: 2025 | TGVYYCAADSLPYGRPYYFQRSAGEYDYWG |
| | | QGTQVTVSSGGGGSGGGGSGGGGSGSQVQL |
| | | VESGGGLVQPGGSLRLSCAISGGTLDSYGI |
| | | GWVRQAPGKQREGVSCMSRSDDRTYYADSV |
| | | KGRFTISKDSAKNTVYLQMTSLKPEDTAVY |
| | | YCAAVDAYGCSLVQPTTYDFWGLGTQVTVS |
| | | SGGGGSGGGGSGGGGSTVSSDKTHTCPPCP |
| | | APEAAGGPSVFLFPPKPKDTLMISRTPEVT |
| | | CVVVDVSHEDPEVKFNWYVDGVEVHNAKTK |
| | | PREEQYNSTYRVVSVLTVLHQDWLNGKEYK |
| | | CKVSNKALGAPIEKTISKAKGQPREPQVYT |
| | | LPPSRDELTKNQVSLTCLVKGFYPSDIAVE |
| | | WESNGQPENNYKTTPPVLDSDGSFLLYSKL |
| | | TVDKSRWQQGNVFSCSVMHEALHNHYTQKS |
| | | LSLSPGK |
| 255 | BsVHH-9 | QVQLQESGGGLVQGGGSLRLSCAASGGIFS |
| | (35x18) | SYAMGWFRQAPGKEREFVAAISRSGRSTNY |
| | SEQ ID | ADSVKGRFTISRDNAKSTVYLQMNSLKPEE |
| | NO: 2026 | TAVYYCAAGRYYNSAYDPSPGDFGSWGHGT |
| | | QVTVSSGGGGSGGGGSGGGGSGSQVQLVES |
| | | GGGLVQPGGSLRLSCAISGGTLDSYGIGWV |
| | | RQAPGKQREGVSCMSRSDDRTYYADSVKGR |
| | | FTISKDSAKNTVYLQMTSLKPEDTAVYYCA |
| | | AVDAYGCSLVQPTTYDFWGLGTQVTVSSGG |
| | | GGSGGGGSGGGGSTVSSDKTHTCPPCPAPE |
| | | AAGGPSVFLFPPKPKDTLMISRTPEVTCVV |
| | | VDVSHEDPEVKFNWYVDGVEVHNAKTKPRE |
| | | EQYNSTYRVVSVLTVLHQDWLNGKEYKCKV |
| | | SNKALGAPIEKTISKAKGQPREPQVYTLPP |
| | | SRDELTKNQVSLTCLVKGFYPSDIAVEWES |
| | | NGQPENNYKTTPPVLDSDGSFLLYSKLTVD |
| | | KSRWQQGNVFSCSVMHEALHNHYTQKSLSL |
| | | SPGK |
| 256 | BsVHH-10 | QVQLVESGGGLVQAGGSLRLSCAASGRTLS |
| | (36x18) | RYAMGWFRQAPGSEREFVAASSWGGDTFYA |
| | SEQ ID | DSVEGRFTFSRDNAKNAVYLQMNSLQPEDT |
| | NO: 2027 | AAYYCAAAPTSFPTTAYSSSNSYAYWGQGT |
| | | QVTVSSGGGGSGGGGSGGGGSGSQVQLVES |
| | | GGGLVQPGGSLRLSCAISGGTLDSYGIGWV |
| | | RQAPGKQREGVSCMSRSDDRTYYADSVKGR |
| | | FTISKDSAKNTVYLQMTSLKPEDTAVYYCA |
| | | AVDAYGCSLVQPTTYDFWGLGTQVTVSSGG |
| | | GGSGGGGSGGGGSTVSSDKTHTCPPCPAPE |
| | | AAGGPSVFLEPPKPKDTLMISRTPEVTCVV |
| | | VDVSHEDPEVKFNWYVDGVEVHNAKTKPRE |
| | | EQYNSTYRVVSVLTVLHQDWLNGKEYKCKV |
| | | SNKALGAPIEKTISKAKGQPREPQVYTLPP |
| | | SRDELTKNQVSLTCLVKGFYPSDIAVEWES |
| | | NGQPENNYKTTPPVLDSDGSFLLYSKLTVD |
| | | KSRWQQGNVFSCSVMHEALHNHYTQKSLSL |
| | | SPGK |
| 257 | BsVHH-11 | QVQLVESGGGLVQAGGSLTLSCAAPGRTFG |
| | (27x19) | TDVVGWFRQAPGKEREFVASISRSGDGIYY |
| | SEQ ID | DDSVKGRFTISRNNAWNTVNLQMNSLKVED |
| | NO: 2028 | TAVYYCAAGDGWSTYDYWGQGTQVTVSSGG |
| | | GGSGGGGSGGGGSGSEVQLVESGGGLVQTG |
| | | GSLRLSCAASGGTFSRDAMAWFRQVPGKER |
| | | EFVALISWSGATTNYADSVKGRFAISRDNG |
| | | KNTVYLQMNRLKPADTAIYYCAADRRPMGS |
| | | RSYFEPTEYDDWGQGTQVTVSSGGGGSGGG |
| | | GSGGGGSTVSSDKTHTCPPCPAPEAAGGPS |
| | | VFLFPPKPKDTLMISRTPEVTCVVVDVSHE |
| | | DPEVKFNWYVDGVEVHNAKTKPREEQYNST |
| | | YRVVSVLTVLHQDWLNGKEYKCKVSNKALG |
| | | APIEKTISKAKGQPREPQVYTLPPSRDELT |
| | | KNQVSLTCLVKGFYPSDIAVEWESNGQPEN |
| | | NYKTTPPVLDSDGSFLLYSKLTVDKSRWQQ |
| | | GNVFSCSVMHEALHNHYTQKSLSLSPGK |
| 258 | BsVHH-13 | QVQLVESGGGLVQAGGSLRLSCAASGRTFG |
| | (32x19) | STAVGWFRQVPGKEREFVSAINRSGSATTY |
| | SEQ ID | ADSVKGRFTISRDNAKNTVYLQMNSLTPED |
| | NO: 2029 | TGVYYCAADSLPYGRPYYFQRSAGEYDYWG |
| | | QGTQVTVSSGGGGSGGGGSGGGGSGSEVQL |
| | | VESGGGLVQTGGSLRLSCAASGGTFSRDAM |
| | | AWFRQVPGKEREFVALISWSGATTNYADSV |
| | | KGRFAISRDNGKNTVYLQMNRLKPADTAIY |
| | | YCAADRRPMGSRSYFEPTEYDDWGQGTQVT |
| | | VSSGGGGSGGGGSGGGGSTVSSDKTHTCPP |
| | | CPAPEAAGGPSVFLFPPKPKDTLMISRTPE |
| | | VTCVVVDVSHEDPEVKFNWYVDGVEVHNAK |
| | | TKPREEQYNSTYRVVSVLTVLHQDWLNGKE |
| | | YKCKVSNKALGAPIEKTISKAKGQPREPQV |
| | | YTLPPSRDELTKNQVSLTCLVKGFYPSDIA |
| | | VEWESNGQPENNYKTTPPVLDSDGSFLLYS |
| | | KLTVDKSRWQQGNVFSCSVMHEALHNHYTQ |
| | | KSLSLSPGK |
| 259 | BsVHH-15 | QVQLVESGGGLVQAGGSLRLSCAASGRTLS |
| | (36x19) | RYAMGWFRQAPGSEREFVAASSWGGDTFYA |
| | SEQ ID | DSVEGRFTFSRDNAKNAVYLQMNSLQPEDT |
| | NO: 2030 | AAYYCAAAPTSFPTTAYSSSNSYAYWGQGT |
| | | QVTVSSGGGGSGGGGSGGGGSGSEVQLVES |
| | | GGGLVQTGGSLRLSCAASGGTFSRDAMAWF |
| | | RQVPGKEREFVALISWSGATTNYADSVKGR |
| | | FAISRDNGKNTVYLQMNRLKPADTAIYYCA |
| | | ADRRPMGSRSYFEPTEYDDWGQGTQVTVSS |
| | | GGGGSGGGGSGGGGSTVSS |
| | | DKTHTCPPCPAPEAAGGPSVFLFPPKPKDT |
| | | LMISRTPEVTCVVVDVSHEDPEVKFNWYVD |
| | | GVEVHNAKTKPREEQYNSTYRVVSVLTVLH |
| | | QDWLNGKEYKCKVSNKALGAPIEKTISKAK |
| | | GQPREPQVYTLPPSRDELTKNQVSLTCLVK |
| | | GFYPSDIAVEWESNGQPENNYKTTPPVLDS |
| | | DGSFLLYSKLTVDKSRWQQGNVFSCSVMHE |
| | | ALHNHYTQKSLSLSPGK |
| 260 | BsVHH-16 | QVQLVESGGGLVQAGGSLTLSCAAPGRTFG |
| | (27x22) | TDVVGWFRQAPGKEREFVASISRSGDGIYY |
| | SEQ ID | DDSVKGRFTISRNNAWNTVNLQMNSLKVED |
| | NO: 2031 | TAVYYCAAGDGWSTYDYWGQGTQVTVSSGG |
| | | GGSGGGGSGGGGSGSEVQLVESGGGLVQAG |
| | | GSLRLSCAASGSIFSINAMAWFRQVPGMER |
| | | ELVAAISRDGGASVYRDSVKGRFTISRDNS |
| | | KNTVYLQMNTLKPEDTAIYVCAATRAIGWT |
| | | ARWITTDFDFWGQGTQVTVSSGGGGSGGGG |
| | | SGGGGSTVSS |
| | | DKTHTCPPCPAPEAAGGPSVFLEPPKPKDT |
| | | LMISRTPEVTCVVVDVSHEDPEVKFNWYVD |
| | | GVEVHNAKTKPREEQYNSTYRVVSVLTVLH |
| | | QDWLNGKEYKCKVSNKALGAPIEKTISKAK |
| | | GQPREPQVYTLPPSRDELTKNQVSLTCLVK |
| | | GFYPSDIAVEWESNGQPENNYKTTPPVLDS |
| | | DGSFLLYSKLTVDKSRWQQGNVFSCSVMHE |
| | | ALHNHYTQKSLSLSPGK |
| 261 | BsVHH-20 | QVQLVESGGGLVQAGGSLRLSCAASGRTLS |
| | (36x22) | RYAMGWFRQAPGSEREFVAASSWGGDTFYA |
| | SEQ ID | DSVEGRFTFSRDNAKNAVYLQMNSLQPEDT |
| | NO: 2032 | AAYYCAAAPTSFPTTAYSSSNSYAYWGQGT |
| | | QVTVSSGGGGSGGGGSGGGGSGSEVQLVES |
| | | GGGLVQAGGSLRLSCAASGSIFSINAMAWF |
| | | RQVPGMERELVAAISRDGGASVYRDSVKGR |
| | | FTISRDNSKNTVYLQMNTLKPEDTAIYVCA |
| | | ATRAIGWTARWITTDFDFWGQGTQVTVSSG |
| | | GGGSGGGGSGGGGSTVSSDKTHTCPPCPAP |
| | | EAAGGPSVFLFPPKPKDTLMISRTPEVTCV |
| | | VVDVSHEDPEVKFNWYVDGVEVHNAKTKPR |
| | | EEQYNSTYRVVSVLTVLHQDWLNGKEYKCK |
| | | VSNKALGAPIEKTISKAKGQPREPQVYTLP |
| | | PSRDELTKNQVSLTCLVKGFYPSDIAVEWE |
| | | SNGQPENNYKTTPPVLDSDGSFLLYSKLTV |
| | | DKSRWQQGNVFSCSVMHEALHNHYTQKSLS |
| | | LSPGK |

TABLE 6
Sequences of VHH-hFc fusion proteins.
“ID” refers to the SEQ ID NO
as used herein.

| ID | Name | Sequence |
|---|---|---|
| 2033 | Linker | GGGGSGGGGSGGGGS |
| 2034 | hFc with LALA-PG | DKTHTCPPCPAPEAAGGPSVFLFPP |
| | and cFAE | KPKDTLMISRTPEVTCVVVDVSHED |
| | mutation | PEVKFNWYVDGVEVHNAKTKPREEQ |
| | F405L | YNSTYRVVSVLTVLHQDWLNGKEYK |
| | | CKVSNKALGAPIEKTISKAKGQPRE |
| | | PQVYTLPPSRDELTKNQVSLTCLVK |
| | | GFYPSDIAVEWESNGQPENNYKTTP |
| | | PVLDSDGSFLLYSKLTVDKSRWQQG |
| | | NVFSCSVMHEALHNHYTQKSLSLSP |
| | | GK |
| 2035 | hFc with LALA-PG | DKTHTCPPCPAPEAAGGPSVFLFPP |
| | and cFAE | KPKDTLMISRTPEVTCVVVDVSHED |
| | mutation | PEVKFNWYVDGVEVHNAKTKPREEQ |
| | K409R | YNSTYRVVSVLTVLHQDWLNGKEYK |
| | | CKVSNKALGAPIEKTISKAKGQPRE |
| | | PQVYTLPPSRDELTKNQVSLTCLVK |
| | | GFYPSDIAVEWESNGQPENNYKTTP |
| | | PVLDSDGSFFLYSRLTVDKSRWQQG |
| | | NVFSCSVMHEALHNHYTQKSLSLSP |
| | | GK |

TABLE 7

| | ascending | | | | | | | | |
|---|---|---|---|---|---|---|---|---|---|
| | numbering | | | PE binding | | P.E. Off-rate ranking SPR- | | | |
| | Patent | | | ELISA | | mouse and human IL-2Ra | | | |
| Clone | clone | | | hu | mo | Rmax- | hd(1/s)- | Rmax- | kd (1/s)- |
| nr. | ID | V ID | Clone ID | IL-2R | IL-2R | hu | hu | mo | mo |
| 8 | 1 | 1-MP01H01 | FJ1427_P035MP01H01 | 1.705 | 0.048 | 126.56 | 2.29E−02 | 8.31 | N/A |
| 9 | 2 | 2-MP01A02 | FJ1427 P035MP01A02 | 2.615 | 0.046 | 846.81 | 1.53E−03 | 9.3 | N/A |
| 21 | 3 | 3-MP01E03 | FJ1427_P035MP01E03 | 2.535 | 0.046 | 413.12 | 7.99E−04 | 9.42 | N/A |
| 30 | 4 | 4-MP01F04 | FJ1427_P035MP01F04 | 2.493 | 0.046 | 690.4 | 2.58E−04 | 18.31 | 2.56E−01 |
| 38 | 5 | 5-MP01F05 | FJ1427_P035MP01F05 | 2.620 | 0.046 | 312.1 | 4.20E−04 | 9.23 | N/A |
| 39 | 6 | 6-MP01G05 | FJ1427_P035MP01G05 | 1.794 | 0.046 | 122.65 | 2.06E−02 | 9.9 | N/A |
| 63 | 7 | 07-MP01G08 | FJ1427 P035MP01G08 | 2.573 | 0.046 | 193.76 | 1.84E−03 | 9.92 | N/A |
| 91 | 8 | 8-MP01C12 | FJ1427_P035MP01C12 | 2.531 | 0.045 | 818.61 | 3.83E−04 | 8.42 | N/A |
| 391 | 9 | 9-MP05G01 | FJ1427_P035MP05G01 | 2.353 | 0.047 | 569.9 | 1.69E−04 | 119.21 | 4.42E−02 |
| 406 | 10 | 10-MP05F03 | FJ1427_P035MP05F03 | 2.465 | 0.054 | 779.86 | 6.39E−04 | 328.6 | 1.05E−01 |
| 416 | 11 | 11-MP05H04 | FJ1427 P035MP05H04 | 2.221 | 0.163 | 201.79 | 1.20E−03 | 533.39 | 1.63E−03 |
| 474 | 12 | 12-MP05B12 | FJ1427 P035MP05B12 | 2.136 | 0.936 | 584.53 | 2.22E−04 | 566.73 | 5.47E−04 |
| 440 | 13 | 13-MP05E12 | FJ1427_P035MP05H07 | 2.34 | 0.048 | 329.08 | 7.42E−04 | 59.27 | 4.78E−02 |
| 1 | 39 | | FJ1427_P035MP01A01 | 2.852 | 0.046 | 860.46 | 1.12E−03 | 9.37 | N/A |
| 2 | 40 | | FJ1427_P035MP01B01 | 2.783 | 0.046 | 306.62 | 1.78E−03 | 9.5 | N/A |
| 7 | 41 | | FJ1427_P035MP01G01 | 2.524 | 0.053 | 911.04 | 4.14E−04 | 8.31 | N/A |
| 13 | 42 | | FJ1427 P035MP01E02 | 2.861 | 0.046 | 840.08 | 1.28E−03 | 8.36 | N/A |
| 14 | 43 | | FJ1427_P035MP01F02 | 2.495 | 0.046 | 250.32 | 3.91E−03 | 8.25 | N/A |
| 16 | 44 | | FJ1427 P035MP01H02 | 2.349 | 0.047 | 388.34 | 1.15E−03 | 8.76 | N/A |
| 19 | 45 | | FJ1427_P035MP01C03 | 2.840 | 0.045 | 856.2 | 1.44E−03 | 8.37 | N/A |
| 20 | 46 | | FJ1427_P035MP01D03 | 2.592 | 0.048 | 696.18 | 1.89E−03 | 8.44 | N/A |
| 22 | 47 | | FJ1427 P035MP01F03 | 2.866 | 0.045 | 789.36 | 3.27E−03 | 9.73 | N/A |
| 23 | 48 | | FJ1427_P035MP01G03 | 0.188 | 0.048 | 244.34 | 1.08E−01 | 10.1 | N/A |
| 28 | 49 | | FJ1427_P035MP01D04 | 2.758 | 0.045 | 776.57 | 2.95E−03 | 10.54 | N/A |
| 29 | 50 | | FJ1427_P035MP01E04 | 2.613 | 0.046 | 790.82 | 2.35E−03 | 10.12 | N/A |
| 31 | 51 | | FJ1427 P035MP01G04 | 2.786 | 0.047 | 329.97 | 1.07E−03 | 11.74 | N/A |
| 37 | 52 | | FJ1427_P035MP01E05 | 2.591 | 0.046 | 347.15 | 4.98E−04 | 11.74 | N/A |
| 40 | 53 | | FJ1427_P035MP01H05 | 2.650 | 0.046 | 254.26 | 2.76E−03 | 9.95 | N/A |
| 46 | 54 | | FJ1427 P035MP01F06 | 2.705 | 0.046 | 388.75 | 5.26E−04 | 9.5 | N/A |
| 53 | 55 | | FJ1427_P035MP01E07 | 2.731 | 0.046 | 725.28 | 1.59E−03 | 9.09 | N/A |
| 54 | 56 | | FJ1427 P035MP01F07 | 2.760 | 0.047 | 356.5 | 6.70E−04 | 17.9 | 4.48E−02 |
| 55 | 57 | | FJ1427_P035MP01G07 | 2.747 | 0.047 | 808.25 | 1.50E−03 | 10.2 | N/A |
| 56 | 58 | | FJ1427_P035MP01H07 | 2.140 | 0.049 | 158.58 | 1.12E−03 | 9.38 | N/A |
| 60 | 59 | | FJ1427_P035MP01D08 | 2.621 | 0.045 | 402.24 | 8.42E−04 | 14.13 | N/A |
| 62 | 60 | | FJ1427 P035MP01F08 | 2.709 | 0.046 | 756.35 | 1.62E−03 | 9.58 | N/A |
| 64 | 61 | | FJ1427 P035MP01H08 | 2.605 | 0.047 | i.s. | i.s. | i.s. | i.s. |
| 68 | 62 | | FJ1427_P035MP01D09 | 2.566 | 0.045 | 729.19 | 2.12E−03 | 7.9 | N/A |
| 77 | 63 | | FJ1427_P035MP01E10 | 2.784 | 0.046 | 816.2 | 1.19E−03 | 8.47 | N/A |
| 79 | 64 | | FJ1427_P035MP01G10 | 2.755 | 0.046 | 414.58 | 4.43E−04 | 8.33 | N/A |
| 80 | 65 | | FJ1427_P035MP01H10 | 2.471 | 0.057 | i.s. | i.s. | i.s. | i.s. |
| 81 | 66 | | FJ1427 P035MP01A11 | 2.809 | 0.046 | 327.6 | 7.78E−04 | 8.91 | N/A |
| 83 | 67 | | FJ1427 P035MP01C11 | 2.784 | 0.045 | 296.26 | 5.56E−04 | 18.03 | 3.51E−01 |
| 84 | 68 | | FJ1427_P035MP01D11 | 3.207 | 0.045 | 750.95 | 2.70E−03 | 8.62 | N/A |
| 85 | 69 | | FJ1427_P035MP01E11 | 2.685 | 0.046 | 832.34 | 7.04E−04 | 8.91 | N/A |
| 86 | 70 | | FJ1427_P035MP01F11 | 2.743 | 0.047 | 830.65 | 1.18E−03 | 8.47 | N/A |
| 87 | 71 | | FJ1427 P035MP01G11 | 2.733 | 0.051 | 876.95 | 1.23E−04 | 54.04 | 3.12E−01 |
| 88 | 72 | | FJ1427_P035MP01H11 | 2.617 | 0.047 | 342.09 | 7.25E−04 | 9.83 | N/A |
| 90 | 73 | | FJ1427_P035MP01B12 | 3.053 | 0.046 | 838.87 | 1.44E−03 | 9.18 | N/A |
| 93 | 74 | | FJ1427_P035MP01E12 | 2.693 | 0.052 | 800.76 | 1.41E−04 | 46.48 | 3.35E−01 |
| 94 | 75 | | FJ1427_P035MP01F12 | 2.668 | 0.048 | 787.83 | 1.10E−04 | 15.5 | 3.29E−01 |
| 386 | 76 | | FJ1427 P035MP05B01 | 2.257 | 0.044 | 715.2 | 8.35E−05 | 28.68 | 4.01E−02 |
| 392 | 77 | | FJ1427 P035MP05H01 | 2.62 | 0.048 | 777.28 | 1.41E−04 | 45.46 | 2.91E−01 |
| 400 | 78 | | FJ1427 P035MP05H02 | 2.292 | 0.048 | 703.96 | 1.41E−04 | 55.18 | 3.09E−01 |
| 402 | 79 | | FJ1427_P035MP05B03 | 2.419 | 0.044 | 742.5 | 1.31E−04 | 55.73 | 5.37E−03 |
| 405 | 80 | | FJ1427_P035MP05E03 | 2.48 | 0.05 | 782.11 | 7.72E−04 | 281.3 | 2.38E−02 |
| 411 | 81 | | FJ1427 P035MP05C04 | 1.826 | 0.079 | 780.27 | 9.05E−04 | 514.39 | 5.70E−03 |
| 412 | 82 | | FJ1427 P035MP05D04 | 1.913 | 0.045 | 189.94 | 2.24E−03 | 206.8 | 1.22E−02 |
| 413 | 83 | | FJ1427 P035MP05E04 | 2.385 | 0.046 | 368.07 | 1.58E−03 | 201.85 | 1.96E−01 |
| 417 | 84 | | FJ1427 P035MP05A05 | 1.863 | 0.052 | 155.83 | 3.41E−03 | 185.24 | 1.72E−02 |
| 418 | 85 | | FJ1427_P035MP05B05 | 2.155 | 0.045 | 247.13 | 1.03E−03 | 311.02 | 1.14E−02 |
| 424 | 86 | | FJ1427_P035MP05H05 | 2.508 | 0.048 | 278.7 | 5.91E−04 | 122.79 | 1.07E−01 |
| 427 | 87 | | FJ1427 P035MP05C06 | 2.427 | 0.071 | 283.43 | 6.59E−04 | 344.54 | 3.11E−03 |
| 428 | 88 | | FJ1427 P035MP05D06 | 2.51 | 0.054 | 298.56 | 6.77E−04 | 101.39 | 7.55E−02 |
| 430 | 89 | | FJ1427_P035MP05F06 | 2.507 | 0.048 | 251.48 | 6.70E−04 | 114.08 | 1.15E−01 |
| 433 | 90 | | FJ1427_P035MP05A07 | 2.434 | 0.053 | 828.7 | 1.04E−03 | 388.01 | 3.69E−02 |
| 434 | 91 | | FJ1427 P035MP05B07 | 1.768 | 0.047 | 275.63 | 1.95E−03 | 157.1 | 1.27E−02 |
| 435 | 92 | | FJ1427 P035MP05C07 | 1.734 | 0.07 | 780.36 | 1.41E−03 | 559.5 | 7.14E−03 |
| 442 | 93 | | FJ1427_P035MP05B08 | 1.878 | 0.057 | 287.84 | 2.53E−03 | 442.89 | 6.08E−03 |
| 445 | 94 | | FJ1427_P035MP05E08 | 2.325 | 0.087 | 836.98 | 2.14E−04 | 409.05 | 9.59E−03 |
| 447 | 95 | | FJ1427_P035MP05G08 | 2.389 | 0.38 | 279.18 | 9.08E−04 | 397.99 | 2.58E−03 |
| 448 | 96 | | FJ1427_P035MP05H08 | 2.167 | 0.05 | 186.2 | 2.78E−03 | 199.56 | 1.29E−02 |
| 451 | 97 | | FJ1427_P035MP05C09 | 0.366 | 0.059 | 212.3 | 6.09E−03 | 361.52 | 4.35E−03 |
| 456 | 98 | | FJ1427_P035MP05H09 | 2.262 | 0.154 | 264.1 | 1.05E−03 | 497.37 | 2.44E−03 |
| 457 | 99 | | FJ1427 P035MP05A10 | 2.181 | 0.24 | 324.06 | 1.20E−03 | 452.24 | 3.21E−03 |
| 459 | 100 | | FJ1427 P035MP05C10 | 0.63 | 0.071 | 239.18 | 4.06E−03 | 290.3 | 4.03E−03 |
| 460 | 101 | | FJ1427 P035MP05D10 | 2.089 | 0.107 | 349.75 | 1.08E−03 | 383.29 | 2.84E−03 |
| 461 | 102 | | FJ1427 P035MP05E10 | 2.266 | 0.718 | 144.76 | 1.69E−03 | 298.19 | 1.77E−03 |
| 467 | 103 | | FJ1427 P035MP05C11 | 2.141 | 0.632 | 182.57 | 4.40E−04 | 389.24 | 8.44E−04 |
| 468 | 104 | | FJ1427 P035MP05D11 | 2.544 | 0.045 | 308.43 | 6.62E−04 | 68.16 | 2.40E−02 |
| 469 | 105 | | FJ1427_P035MP05E11 | 2.346 | 0.049 | 532.77 | 1.00E−03 | 225.19 | 2.96E−02 |
| 470 | 106 | | FJ1427_P035MP05F11 | 2.271 | 0.046 | 705.9 | 1.73E−03 | 151.4 | 5.10E−02 |
| 475 | 107 | | FJ1427_P035MP05C12 | 2.402 | 0.045 | 160.88 | 8.74E−04 | 22.12 | 2.92E−02 |
| 476 | 108 | | FJ1427 P035MP05D12 | 2.386 | 0.066 | 430.66 | 2.35E−03 | 157.31 | 3.66E−02 |
| 477 | 109 | | FJ1427 P035MP05E12 | 2.151 | 0.047 | 614.28 | 2.73E−04 | 75.38 | 8.23E−02 |
| 478 | 110 | | FJ1427 P035MP05F12 | 2.185 | 0.113 | 197.87 | 4.69E−04 | 154.72 | 4.63E−03 |

| | ascend- | | | | | | |
|---|---|---|---|---|---|---|---|
| | ing | | | | | | |
| | number- | | | | | | |
| | ing | | | | | | CDR3 |
| Clone | Patent | | VH | | | | Family |
| nr. | clone ID | VH | ID | CDR1 | CDR2 | CDR3 | ID |
| 8 | 1 | EVQLVESGGGLVQAGGSLRLSCAASGRTFR | a12 | THNMG- | AISWNVDNTLYADSVKG- | DNIPLSSDVAATATEYDY- | 6 |
| | | THNMGWFRRAPGKEREFVAAISWNVDNTLY | | SEQ ID | SEQ ID | SEQ ID | |
| | | ADSVKGRFTISRDNGRNMVYLQMNSLKPED | | NO: 467 | NO: 468 | NO: 469 | |
| | | TAVYYCAADNIPLSSDVAATATEYDYWGQG | | | | | |
| | | TQVTVSS- | | | | | |
| | | SEQ ID | | | | | |
| | | NO: 1 | | | | | |
| 9 | 2 | QVQLVESGGGLVQPGGSLRLSCATSGFTFR | a80 | NNFMS- | TISYGGESTTYAESVKG- | ATSYDSIRSGS- | 2 |
| | | NNFMSWVRQAPGKGLEWVSTISYGGESTTY | | SEQ ID | SEQ ID | SEQ ID | |
| | | AESVKGRFTISRDNAKNTLYLQMNNLKPED | | NO: 470 | NO: 471 | NO: 472 | |
| | | TAVYYCAKATSYDSIRSGSRGQGTQVTVSS | | | | | |
| | | - | | | | | |
| | | SEQ ID | | | | | |
| | | NO: 2 | | | | | |
| 21 | 3 | QVQLVESGGGLVQAGGSLRLSCTASGRTLS | a74 | SYSMA- | AISSSGVVTHVLDSVKG- | TASSYSTYEANYNY- | 14 |
| | | SYSMAWFRQAADKGREFVTAISSSGVVTHV | | SEQ ID | SEQ ID | SEQ ID | |
| | | LDSVKGRFTISRDNAKNTVYLQMNSLQPED | | NO: 473 | NO: 474 | NO: 475 | |
| | | TALYFCAGTASSYSTYEANYNYWGQGTLVT | | | | | |
| | | VSS- | | | | | |
| | | SEQ ID | | | | | |
| | | NO: 3 | | | | | |
| 30 | 4 | QVQLVESGGGLVQAGGSLRLSCAASGGTFR | a60 | TRNMG- | AVSWNVDNKLYADSVKG- | DNIPLSSDMRPTATEYDY- | 6 |
| | | TRNMGWFRRAPGKEREFVAAVSWNVDNKLY | | SEQ ID | SEQ ID | SEQ ID | |
| | | ADSVKGRFTISRDNGRNMVYLQMNSLKPED | | NO: 476 | NO: 477 | NO: 478 | |
| | | TAVYYCAADNIPLSSDMRPTATEYDYWGQG | | | | | |
| | | TQVTVSS- | | | | | |
| | | SEQ ID | | | | | |
| | | NO: 4 | | | | | |
| 38 | 5 | EVQLVESGGGLVQAGGSLRLSCAASIRAFT | a15 | TWSMA- | RINVSGSVTYYADFVKG- | DRTGVGTNDYNY- | 9 |
| | | TWSMAWFRQAPGKEREYVARINVSGSVTYY | | SEQ ID | SEQ ID | SEQ ID | |
| | | ADFVKGRFTISRDNAKKTMYLEMNNLKPED | | NO: 479 | NO: 480 | NO: 481 | |
| | | TALYYCAADRTGVGTNDYNYWGQGTQVTVS | | | | | |
| | | S- | | | | | |
| | | SEQ ID | | | | | |
| | | NO: 5 | | | | | |
| 39 | 6 | QVQLQESGGGLVQAGGSLRLSCAASGRTFS | a49 | SYAMG- | VISWNVDNTEYTDSVKG- | DSIPLSSDMSPTATEYGY- | 10 |
| | | SYAMGWFRQAPGKEREFVAVISWNVDNTEY | | SEQ ID | SEQ ID | SEQ ID | |
| | | TDSVKGRFTISRDNDKNMVYLQMNSLKPED | | NO: 482 | NO: 483 | NO: 484 | |
| | | TAVYYCAADSIPLSSDMSPTATEYGYWGQG | | | | | |
| | | TQVTVSS- | | | | | |
| | | SEQ ID | | | | | |
| | | NO: 6 | | | | | |
| 63 | 7 | EVQLVESGGGLVQAGGSLRLSCAASGRAFS | a11 | MYNMG- | ATGWSGANTPYADSVKG- | DSIRLRSDVTRIPLEYDY- | 11 |
| | | MYNMGWFRQAPGKEREFVAATGWSGANTPY | | SEQ ID | SEQ ID | SEQ ID | |
| | | ADSVKGRFTISRDNTQNTVYLQMNSLKPED | | NO: 485 | NO: 486 | NO: 487 | |
| | | TATYYCAADSIRLRSDVTRIPLEYDYWGQG | | | | | |
| | | TQVTVSS- | | | | | |
| | | SEQ ID | | | | | |
| | | NO: 7 | | | | | |
| 91 | 8 | QVQLVESGGGLVQPGGSLRLSCATSGFTFS | a81 | NNFMS- | TISYGGESTTYAEAVKG- | ATSYTSIRGAP- | 3 |
| | | NNFMSWVRQAPGKGLEFVSTISYGGESTTY | | SEQ ID | SEQ ID | SEQ ID | |
| | | AEAVKGRFTISRDNAKNTLYLQMNNLKPED | | NO: 488 | NO: 489 | NO: 490 | |
| | | TAIYYCAKATSYTSIRGAPRGQGTQVTVSS | | | | | |
| | | - | | | | | |
| | | SEQ ID | | | | | |
| | | NO: 8 | | | | | |
| 391 | 9 | EVQLVESGGGLVQAGGSLRLSCAASGGSIY | a7 | TYNMG- | GTLWSGGDSVYADFAKG- | DPLSLTSDWRVDELSS- | 7 |
| | | TYNMGWFRQAPGKEREFVAGTLWSGGDSVY | | SEQ ID | SEQ ID | SEQ ID | |
| | | ADFAKGRFTLSRENAKNTLYLQMNSLKPED | | NO: 491 | NO: 492 | NO: 493 | |
| | | TATYYCAIDPLSLTSDWRVDELSSWGKGTL | | | | | |
| | | VTVSS- | | | | | |
| | | SEQ ID | | | | | |
| | | NO: 9 | | | | | |
| 406 | 10 | QVQLVESGGGLVQAGGSLRLSCAASGIPFD | a63 | NYAMG- | ARDLEGIITRYGDSVKG- | RDGGVVAGSRSSAQYNY- | 12 |
| | | NYAMGWFRQAPGKEREFVAARDLEGIITRY | | SEQ ID | SEQ ID | SEQ ID | |
| | | GDSVKGRFTISRGNAKNTVFLQMNSLKPED | | NO: 494 | NO: 495 | NO: 496 | |
| | | TAVYYCAARDGGVVAGSRSSAQYNYWGQGT | | | | | |
| | | QVTVSS- | | | | | |
| | | SEQ ID | | | | | |
| | | NO: 10 | | | | | |
| 416 | 11 | QLQLVESGGGLVQAGGSLRLSCAASGLTFE | a36 | GYAIG- | YITGSDGTTYYINSVKG- | DRLGSQGRYASAWWRSGDMDL- | 4 |
| | | GYAIGWFRQAPGKEREGVSYITGSDGTTYY | | SEQ ID | SEQ ID | SEQ ID | |
| | | INSVKGRFTISSDNAKSTVYLQMNTLKPED | | NO: 497 | NO: 498 | NO: 499 | |
| | | TAVYYCAVDRLGSQGRYASAWWRSGDMDLW | | | | | |
| | | GKGTQVTVSS- | | | | | |
| | | SEQ ID | | | | | |
| | | NO: 11 | | | | | |
| 474 | 12 | QVQLVESGGGLVQAGGSLRLSCAASGFTFD | a59 | GYAIG- | YITGSDGSTYYADSVKG- | DRLGSRGAYVPIWWRSSDMDL- | 4 |
| | | GYAIGWFRQAPGKEREGVSYITGSDGSTYY | | SEQ ID | SEQ ID | SEQ ID | |
| | | ADSVKGRFTISSNNAKNTVYLHMNSLKPDD | | NO: 500 | NO: 501 | NO: 502 | |
| | | AAVYYCAIDRLGSRGAYVPIWWRSSDMDLW | | | | | |
| | | GKGTLVTVSS- | | | | | |
| | | SEQ ID | | | | | |
| | | NO: 12 | | | | | |
| 440 | 13 | QVQLQESGGGLVQAGDSLRLSCAASGFNFG | a43 | WHAMG- | TITWTGRDTYYADSVRG- | ARERATWAYSEDDCDY- | 1 |
| | | WHAMGWFRQAPGKEREFVATITWTGRDTYY | | SEQ ID | SEQ ID | SEQ ID | |
| | | ADSVRGRFTISKDNAKDTLFLQMNSLRPDD | | NO: 503 | NO: 504 | NO: 505 | |
| | | TGVYYCAKARERATWAYSEDDCDYWGQGTQ | | | | | |
| | | VTVSS- | | | | | |
| | | SEQ ID | | | | | |
| | | NO: 13 | | | | | |
| 1 | 39 | EVQLVESGGGLVQAGDSLRLSCAASGRSFR | a3 | NYILA- | AISWLDGTLYADSVED- | DRGPVRPVLAPDVDY- | 8 |
| | | NYILAWYRQAPGKEREFLAAISWLDGTLYA | | SEQ ID | SEQ ID | SEQ ID | |
| | | DSVEDRFTISRDNPKNTVHLQMDNLKPEDT | | NO: 581 | NO: 582 | NO: 583 | |
| | | AVYYCAADRGPVRPVLAPDVDYWGQGTQVS | | | | | |
| | | VSS- | | | | | |
| | | SEQ ID | | | | | |
| | | NO: 39 | | | | | |
| 2 | 40 | EVQLVESGGGWVQAGDSLRLSCAASGRTFR | a23 | NYVMG- | VITSLGGTVYADSVAN- | DRGPARYISASDVDY- | 8 |
| | | NYVMGWFRQVPGKEREFLSVITSLGGTVYA | | SEQ ID | SEQ ID | SEQ ID | |
| | | DSVANRFTISRDNPKDTVYLQMDSLKPEDT | | NO: 584 | NO: 585 | NO: 586 | |
| | | AVYYCAADRGPARYISASDVDYWGQGTQVT | | | | | |
| | | ASS- | | | | | |
| | | SEQ ID | | | | | |
| | | NO: 40 | | | | | |
| 7 | 41 | QVQLQESGGGLVQAGGSLRLSCAASGRTFR | a48 | THNMG- | AISWNVDNTLYADSVKG- | DNIPLSSDVRATATEFGY- | 6 |
| | | THNMGWFRRAPGKEREFVAAISWNVDNTLY | | SEQ ID | SEQ ID | SEQ ID | |
| | | ADSVKGRFTISRDNDRNMVYLQMNSLKPED | | NO: 587 | NO: 588 | NO: 589 | |
| | | TAVYFCAADNIPLSSDVRATATEFGYWGQG | | | | | |
| | | TRVTVSS- | | | | | |
| | | SEQ ID | | | | | |
| | | NO: 41 | | | | | |
| 13 | 42 | QVQLVESGGGLVQAGDSLRLSCAASGRSFR | a56 | NYILA- | AISWLDGTLYADSVED- | DRGPVRPVLAPDVDY- | 8 |
| | | NYILAWYRQAPGKEREFLAAISWLDGTLYA | | SEQ ID | SEQ ID | SEQ ID | |
| | | DSVEDRFTISRDNPKNTVHLQMDNLKPEDT | | NO: 590 | NO: 591 | NO: 592 | |
| | | AVYYCAADRGPVRPVLAPDVDYWGQGTQVT | | | | | |
| | | VSS- | | | | | |
| | | SEQ ID | | | | | |
| | | NO: 42 | | | | | |
| 14 | 43 | QVQLQESGGGLVQAGGSLRLSCAASGRTFR | a47 | THNMG- | AISWNIDNKLYADSVKG- | DKIPLSSDVAATATEYDD- | 5 |
| | | THNMGWFRRAPGKEREFVAAISWNIDNKLY | | SEQ ID | SEQ ID | SEQ ID | |
| | | ADSVKGRSTISRDNGGNMVFLQMNSLKPED | | NO: 593 | NO: 594 | NO: 595 | |
| | | TAVYYCAADKIPLSSDVAATATEYDDWGQG | | | | | |
| | | TQVTVSS- | | | | | |
| | | SEQ ID | | | | | |
| | | NO: 43 | | | | | |
| 16 | 44 | QLQLVESGGGLVQAGDSLRLSCAASGRAFS | a28 | RYAVG- | AINSSGANTYVLDSVKG- | TSSSYSTYEANYNV- | 14 |
| | | RYAVGWFRMAPGKGREFVSAINSSGANTYV | | SEQ ID | SEQ ID | SEQ ID | |
| | | LDSVKGRFTISRDNDKNTAYLQMDSLQPED | | NO: 596 | NO: 597 | NO: 598 | |
| | | TAVYWCAATSSSYSTYEANYNVWGQGTQVT | | | | | |
| | | VSS- | | | | | |
| | | SEQ ID | | | | | |
| | | NO: 44 | | | | | |
| 19 | 45 | EVQLVESGGGLVQPGGSLRLSCATSGFTFR | a19 | NNFMS- | TISYGGESTTYAESVKG- | ATSYDSIRSGS- | 2 |
| | | NNFMSWVRQAPGKGLEWVSTISYGGESTTY | | SEQ ID | SEQ ID | SEQ ID | |
| | | AESVKGRFTISRDNAKNTLYLQMNNLKPED | | NO: 599 | NO: 600 | NO: 601 | |
| | | TAVYYCAKATSYDSIRSGSRGQGTQVTVSS | | | | | |
| | | - | | | | | |
| | | SEQ ID | | | | | |
| | | NO: 45 | | | | | |
| 20 | 46 | EVQLVESGGGLVQPGGSLRLSCATSGFTFR | a18 | NNFMS- | TISYGGESTTYAESVKG- | ATSYDSIRSGS- | 2 |
| | | NNFMSWVRQAPGEGLEWVSTISYGGESTTY | | SEQ ID | SEQ ID | SEQ ID | |
| | | AESVKGRFTISRDNAKNTLYLQMNNLKPED | | NO: 602 | NO: 603 | NO: 604 | |
| | | TAVYYCAKATSYDSIRSGSRGQGTQVTVSS | | | | | |
| | | - | | | | | |
| | | SEQ ID | | | | | |
| | | NO: 46 | | | | | |
| 22 | 47 | QVQLVESGGGLVQPGGSLRLSCAASGFTFS | a78 | NNFMS- | TISYGGESTTYAESVKG- | ATSYDSVRSGS- | 2 |
| | | NNFMSWVRQAPGKGLEWVSTISYGGESTTY | | SEQ ID | SEQ ID | SEQ ID | |
| | | AESVKGRFTISRDNAKNTLYLQMNNLKPED | | NO: 605 | NO: 606 | NO: 607 | |
| | | TAVYYCAKATSYDSVRSGSRGQGTQVTVSS | | | | | |
| | | - | | | | | |
| | | SEQ ID | | | | | |
| | | NO: 47 | | | | | |
| 23 | 48 | QVQLVESGGGLVQAGDSLRLSCAASGRSFR | a55 | NYILA- | AISWLDGTLYADSVED- | DQGPVRPVLAPDVDY- | 8 |
| | | NYILAWYRQAPGKEREFLAAISWLDGTLYA | | SEQ ID | SEQ ID | SEQ ID | |
| | | DSVEDRFTISRDNPKNTVHLQMDNLKPEDT | | NO: 608 | NO: 609 | NO: 610 | |
| | | AVYYCAADQGPVRPVLAPDVDYWGQGTQVT | | | | | |
| | | VSS- | | | | | |
| | | SEQ ID | | | | | |
| | | NO: 48 | | | | | |
| 28 | 49 | QVQLVESGGGWVQPGDSLRLSCAASGRSFR | a86 | NYVMG- | VITWLGGTLDADSVAD- | DRGPARYISASDVDY- | 8 |
| | | NYVMGWFRQVPGKEREFLSVITWLGGTLDA | | SEQ ID | SEQ ID | SEQ ID | |
| | | DSVADRFTISRDNSKNTVYLQMDSLKPEDT | | NO: 611 | NO: 612 | NO: 613 | |
| | | AVYYCAADRGPARYISASDVDYWGQGTQVT | | | | | |
| | | VSS- | | | | | |
| | | SEQ ID | | | | | |
| | | NO: 49 | | | | | |
| 29 | 50 | QVQLVESGGGLVQAGDSLRLSCAVSGRSFR | a58 | NYILA- | AISWLDGTFYANSVEG- | DRGPVRPVLAPDVDY- | 8 |
| | | NYILAWYRQAPGKEREFLAAISWLDGTFYA | | SEQ ID | SEQ ID | SEQ ID | |
| | | NSVEGRFTISRDNPKNTVHLQMDGLKPEDT | | NO: 614 | NO: 615 | NO: 616 | |
| | | AVYYCAADRGPVRPVLAPDVDYWGQGTQVT | | | | | |
| | | VAS- | | | | | |
| | | SEQ ID | | | | | |
| | | NO: 50 | | | | | |
| 31 | 51 | QVQLVESGGGLVQPGGSLRLSCAASGFTFS | a75 | NNFMS- | TISYFGDSTRYAESVKG- | ATSYDSIRSGS- | 2 |
| | | NNFMSWVRQAPGKGLEWVSTISYFGDSTRY | | SEQ ID | SEQ ID | SEQ ID | |
| | | AESVKGRFTISRDNEKNTLHLQMNNLKPED | | NO: 617 | NO: 618 | NO: 619 | |
| | | TAVYYCAKATSYDSIRSGSRGRGTQVTVSS | | | | | |
| | | - | | | | | |
| | | SEQ ID | | | | | |
| | | NO: 51 | | | | | |
| 37 | 52 | QVQLVESGGGLVQAGGSLRLSCAASGRTFR | a69 | THNMG- | VISWNVDNKLYADSVKG- | DNIPLSSDVRATATEFGY- | 6 |
| | | THNMGWFRRAPGEEREFVAVISWNVDNKLY | | SEQ ID | SEQ ID | SEQ ID | |
| | | ADSVKGRFTISRDNGRNMVYLQMNSLKPED | | NO: 620 | NO: 621 | NO: 622 | |
| | | TAVYYCAADNIPLSSDVRATATEFGYWGQG | | | | | |
| | | TQVTVSS- | | | | | |
| | | SEQ ID | | | | | |
| | | NO: 52 | | | | | |
| 40 | 53 | EVQLVESGGGLVQPGGSLRLSCAASGFTFS | a17 | NNFMS- | TISYFGDSTTYAESVKG- | ATSYDSIRSGS- | 2 |
| | | NNFMSWVRQAPGKGLEWVSTISYFGDSTTY | | SEQ ID | SEQ ID | SEQ ID | |
| | | AESVKGRFTISRDNAKNTLYLQMNNLKPED | | NO: 623 | NO: 624 | NO: 625 | |
| | | TAVYYCAKATSYDSIRSGSRGRGTQVTVSS | | | | | |
| | | - | | | | | |
| | | SEQ ID | | | | | |
| | | NO: 53 | | | | | |
| 46 | 54 | QLQLVESGGGLVQAGGSLRLSCAASGGAFS | a31 | RYAVG- | AIDLSGTNTHVLDSVKG- | TSSSYSDYEANYNI- | 14 |
| | | RYAVGWFRMAPGKGREFVSAIDLSGTNTHV | | SEQ ID | SEQ ID | SEQ ID | |
| | | LDSVKGRFTISRDNDKNTAYLQMDKLQPED | | NO: 626 | NO: 627 | NO: 628 | |
| | | TAVYWCAATSSSYSDYEANYNIWGQGTQVT | | | | | |
| | | VSS- | | | | | |
| | | SEQ ID | | | | | |
| | | NO: 54 | | | | | |
| 53 | 55 | QVQLQESGGGLVQAGDSLRLSCAASGRSFR | a46 | NYILA- | AISWLEGTLYADSVED- | DRGPVRPVLAPDVDY- | 8 |
| | | NYILAWYRQAPGKEREFLAAISWLEGTLYA | | SEQ ID | SEQ ID | SEQ ID | |
| | | DSVEDRFTISRDNPKNTVHLQMDSLKPEDT | | NO: 629 | NO: 630 | NO: 631 | |
| | | AVYYCAADRGPVRPVLAPDVDYWGQGTQVT | | | | | |
| | | VSS- | | | | | |
| | | SEQ ID | | | | | |
| | | NO: 55 | | | | | |
| 54 | 56 | QVQLVESGGGLVQAGGSLRLSCAATGLTFR | a71 | QHNMG- | AISWNVGSTYFADSVKG- | DNIPLASDMRATATAYGY- | 6 |
| | | QHNMGWFRRAPGKEREFVAAISWNVGSTYF | | SEQ ID | SEQ ID | SEQ ID | |
| | | ADSVKGRFTISRDNGKNMVYLQMNSLKPED | | NO: 632 | NO: 633 | NO: 634 | |
| | | TAVYYCAADNIPLASDMRATATAYGYWGQG | | | | | |
| | | TQVTVSS- | | | | | |
| | | SEQ ID | | | | | |
| | | NO: 56 | | | | | |
| 55 | 57 | QVQLVESGGGLVQTGDSLRLSCAASGRSFR | a82 | NYILA- | AISWLDGTLYADSVEG- | DRGPVRPVLAPDVDY- | 8 |
| | | NYILAWYRQAPGKEREFLAAISWLDGTLYA | | SEQ ID | SEQ ID | SEQ ID | |
| | | DSVEGRFTISRDNPKNTVHLQMDSLKPEDT | | NO: 635 | NO: 636 | NO: 637 | |
| | | AVYYCAADRGPVRPVLAPDVDYWGQGTQVT | | | | | |
| | | VSS- | | | | | |
| | | SEQ ID | | | | | |
| | | NO: 57 | | | | | |
| 56 | 58 | EVQLVESGGGLVQAGGSLRLSCAASGRTLS | a13 | GYAMA- | AISSSGIVTHVLDSVKG- | TASSYSDYEANYNY- | 14 |
| | | GYAMAWFRQPPDKGREFVTAISSSGIVTHV | | SEQ ID | SEQ ID | SEQ ID | |
| | | LDSVKGRFTISRDNAKNTVYLQMNSLQPED | | NO: 638 | NO: 639 | NO: 640 | |
| | | TALYFCAATASSYSDYEANYNYWGQGTLVT | | | | | |
| | | VSS- | | | | | |
| | | SEQ ID | | | | | |
| | | NO: 58 | | | | | |
| 60 | 59 | EVQLVESGGGLVQAGGSLRLSCAASGGTFR | a8 | TRNMG- | AVSWNVDNKLYAGSVKG- | DNIPLSSDMRPTATEYDY- | 6 |
| | | TRNMGWFRRAPGKEREFVAAVSWNVDNKLY | | SEQ ID | SEQ ID | SEQ ID | |
| | | AGSVKGRFTISRDNGRNMVYLQMNSLKPED | | NO: 641 | NO: 642 | NO: 643 | |
| | | TAVYYCAADNIPLSSDMRPTATEYDYWGQG | | | | | |
| | | TQVTVSS- | | | | | |
| | | SEQ ID | | | | | |
| | | NO: 59 | | | | | |
| 62 | 60 | EVQLVESGGGWVQPGDSLRLSCAASGRSFR | a24 | NYVMG- | VITSLGGTLDADSVAD- | DRGPARYISASDVDY- | 8 |
| | | NYVMGWFRQVPGKEREFLSVITSLGGTLDA | | SEQ ID | SEQ ID | SEQ ID | |
| | | DSVADRFTISRDNSKNTVYLQMDSLKPEDT | | NO: 644 | NO: 645 | NO: 646 | |
| | | AVYYCAADRGPARYISASDVDYWGQGTQVT | | | | | |
| | | VSS- | | | | | |
| | | SEQ ID | | | | | |
| | | NO: 60 | | | | | |
| 64 | 61 | EVQLVESGGRLVQSGGSLRLSCAASGRAFS | a25 | THNMG- | AISWNVDNKLYANSVKG- | DNIPLSSDMRATATEYDV- | 6 |
| | | THNMGWFRRAPGKEREFVAAISWNVDNKLY | | SEQ ID | SEQ ID | SEQ ID | |
| | | ANSVKGRFAISRDNGRNMVYLQMNSLKPED | | NO: 647 | NO: 648 | NO: 649 | |
| | | TAVYYCAADNIPLSSDMRATATEYDVWGQG | | | | | |
| | | TQVTVSS- | | | | | |
| | | SEQ ID | | | | | |
| | | NO: 61 | | | | | |
| 68 | 62 | QVQLVESGGGLVQPGGSLRLSCAASGFTFS | a77 | NNFMS- | TISYGGESTTYAESVKG- | ATSYDSIRSGS- | 2 |
| | | NNFMSWVRQAPGKGLEWVSTISYGGESTTY | | SEQ ID | SEQ ID | SEQ ID | |
| | | AESVKGRFTISRDNAKNTLYLQMNNLKPED | | NO: 650 | NO: 651 | NO: 652 | |
| | | TAVYYCAKATSYDSIRSGSRGQGTQVTVSS | | | | | |
| | | - | | | | | |
| | | SEQ ID | | | | | |
| | | NO: 62 | | | | | |
| 77 | 63 | QVQLVESGGGLVQAGDSLRLSCAASGRSFR | a57 | NYILA- | AISWLDGTLYADSVED- | DRGPVRPVLAPDVDY- | 8 |
| | | NYILAWYRQAPGKEREFLAAISWLDGTLYA | | SEQ ID | SEQ ID | SEQ ID | |
| | | DSVEDRFTISRDNPKNTVHLQMDSLKPEDT | | NO: 653 | NO: 654 | NO: 655 | |
| | | AVYYCAADRGPVRPVLAPDVDYWGQGTQVT | | | | | |
| | | VSS- | | | | | |
| | | SEQ ID | | | | | |
| | | NO: 63 | | | | | |
| 79 | 64 | EVQLVESGGGLVQAGGSLRLSCAASGGAFS | a6 | RYAVG- | AIDLSGTNTHVLDSVKG- | TSSSYSDYEANYNI- | 14 |
| | | RYAVGWFRMAPGKGREFVSAIDLSGTNTHV | | SEQ ID | SEQ ID | SEQ ID | |
| | | LDSVKGRFTISRDNDKNTAYLQMDKLQPED | | NO: 656 | NO: 657 | NO: 658 | |
| | | TAVYWCAATSSSYSDYEANYNIWGQGTQVT | | | | | |
| | | VSS- | | | | | |
| | | SEQ ID | | | | | |
| | | NO: 64 | | | | | |
| 80 | 65 | QVQLVESGGGLVETGGSLRLSCAASGITFN | a52 | DHTMA- | ARDWSDIITRYASSVKG- | REGGVVAGVRSGAPYDY- | 13 |
| | | DHTMAWFRQAPGKEREFVAARDWSDIITRY | | SEQ ID | SEQ ID | SEQ ID | |
| | | ASSVKGRFTISRDNAGNTGFLQMNSLRPED | | NO: 659 | NO: 660 | NO: 661 | |
| | | TAVYYCAAREGGVVAGVRSGAPYDYWGQGT | | | | | |
| | | QVTVSS- | | | | | |
| | | SEQ ID | | | | | |
| | | NO: 65 | | | | | |
| 81 | 66 | QVQLVESGGGLVQPGGSLRLSCAASGRTFE | a79 | THNMG- | VISWNVDSTEYTDSVKG- | DNIPLSSDMSPTAAEYGY- | 6 |
| | | THNMGWFRRAPGKEREFVAVISWNVDSTEY | | SEQ ID | SEQ ID | SEQ ID | |
| | | TDSVKGRFTISRDNDKNMVYLQMNSLKPED | | NO: 662 | NO: 663 | NO: 664 | |
| | | TGVYYCAADNIPLSSDMSPTAAEYGYWGQG | | | | | |
| | | TQVTVSS- | | | | | |
| | | SEQ ID | | | | | |
| | | NO: 66 | | | | | |
| 83 | 67 | QVQLVESGGGLVQAGGSLRLSCAASGGTFR | a61 | TRNMG- | AVSWNVDNKLYAGSVKG- | DNIPLSSDMRPTATEYDY- | 6 |
| | | TRNMGWFRRAPGKEREFVAAVSWNVDNKLY | | SEQ ID | SEQ ID | SEQ ID | |
| | | AGSVKGRFTISRDNGRNMVYLQMNSLKPED | | NO: 665 | NO: 666 | NO: 667 | |
| | | TAVYYCAADNIPLSSDMRPTATEYDYWGQG | | | | | |
| | | TQVTVSS- | | | | | |
| | | SEQ ID | | | | | |
| | | NO: 67 | | | | | |
| 84 | 68 | QLQLVESGGGLVQAGDSLRLSCAASGRSFR | a29 | NYIMA- | AISWLDGTLYADSVED- | DRGPVRPVLAPDVDY- | 8 |
| | | NYIMAWYRQAPGKEREFLAAISWLDGTLYA | | SEQ ID | SEQ ID | SEQ ID | |
| | | DSVEDRFTISRDNPKNTVHLQMDSLKPEDT | | NO: 668 | NO: 669 | NO: 670 | |
| | | AVYYCAADRGPVRPVLAPDVDYWGQGTQVT | | | | | |
| | | VSS- | | | | | |
| | | SEQ ID | | | | | |
| | | NO: 68 | | | | | |
| 85 | 69 | QVQLVESGGGLVQPGGSLRLSCAASGFTFS | a76 | NNFMS- | TISYFGDSTRYAESVKG- | ATSYDSIRSGS- | 2 |
| | | NNFMSWVRQAPGKGLEWVSTISYFGDSTRY | | SEQ ID | SEQ ID | SEQ ID | |
| | | AESVKGRFTISRDNEKNTLYLQMNNLKPED | | NO: 671 | NO: 672 | NO: 673 | |
| | | TAVYYCAKATSYDSIRSGSRGRGTQVTVSS | | | | | |
| | | - | | | | | |
| | | SEQ ID | | | | | |
| | | NO: 69 | | | | | |
| 86 | 70 | QVQLQESGGGLVQAGDSLRLSCAASGRSFR | a45 | NYILA- | AISWLDGTLYADSVED- | DRGPVRPVLAPDVDY- | 8 |
| | | NYILAWYRQAPGKEREFLAAISWLDGTLYA | | SEQ ID | SEQ ID | SEQ ID | |
| | | DSVEDRFTISRDNPKNTVHLQMDSLKPEDT | | NO: 674 | NO: 675 | NO: 676 | |
| | | AVYYCAADRGPVRPVLAPDVDYWGQGTQVT | | | | | |
| | | VSS- | | | | | |
| | | SEQ ID | | | | | |
| | | NO: 70 | | | | | |
| 87 | 71 | QVQLVESGGGLVQAGGSLRLSCAASGITFN | a66 | DHTMA- | ARDWSDIITRYASSVKG- | REGGVVAGVRSGAPYDY- | 13 |
| | | DHTMAWFRQAPGKEREFVAARDWSDIITRY | | SEQ ID | SEQ ID | SEQ ID | |
| | | ASSVKGRFTISRDNAGNTGFLQMNSLRPED | | NO: 677 | NO: 678 | NO: 679 | |
| | | TAVYYCAAREGGVVAGVRSGAPYDYWGRGT | | | | | |
| | | QVTVSS- | | | | | |
| | | SEQ ID | | | | | |
| | | NO: 71 | | | | | |
| 88 | 72 | QVQLVESGGGLVQAGGSLRLSCAASGRTFR | a70 | THNMG- | AISWNVDNTLYADSVKG- | DNIPLSSDVRATATEFGY- | 6 |
| | | THNMGWFRRAPGKEREFVAAISWNVDNTLY | | SEQ ID | SEQ ID | SEQ ID | |
| | | ADSVKGRFTISRDNDRNMVYLQMNSLKPED | | NO: 680 | NO: 681 | NO: 682 | |
| | | TAVYFCAADNIPLSSDVRATATEFGYWGQG | | | | | |
| | | TRVTVSS- | | | | | |
| | | SEQ ID | | | | | |
| | | NO: 72 | | | | | |
| 90 | 73 | QVQLQESGGGLVQAGDSLRLSCAASGRSFR | a44 | NYILA- | AISWLDGTFYANSVEG- | DRGPVRPVLAPDVDY- | 8 |
| | | NYILAWYRQAPGKEREFLAAISWLDGTFYA | | SEQ ID | SEQ ID | SEQ ID | |
| | | NSVEGRFTISRDNPKNTVHLQMDGLKPEDT | | NO: 683 | NO: 684 | NO: 685 | |
| | | AVYYCAADRGPVRPVLAPDVDYWGQGTQVT | | | | | |
| | | VAS- | | | | | |
| | | SEQ ID | | | | | |
| | | NO: 73 | | | | | |
| 93 | 74 | QVQLVESGGGLVQAGGSLRLSCAASGITFN | a65 | DHTMA- | ARDWSDIITRYASSVKG- | REGGVVAGVRSGAPYDY- | 13 |
| | | DHTMAWFRQAPGKEREFVAARDWSDIITRY | | SEQ ID | SEQ ID | SEQ ID | |
| | | ASSVKGRFTISRDNAGNTGFLQMNSLRPED | | NO: 686 | NO: 687 | NO: 688 | |
| | | TAVYYCAAREGGVVAGVRSGAPYDYWGQGT | | | | | |
| | | QVTVSS- | | | | | |
| | | SEQ ID | | | | | |
| | | NO: 74 | | | | | |
| 94 | 75 | EVQLVESGGGLVQAGGSLGLSCAASGITFN | a4 | DHTMA- | ARDWSDIITRYASSVKG- | REGGVVAGVRSGAPYDY- | 13 |
| | | DHTMAWFRQAPGKEREFVAARDWSDIITRY | | SEQ ID | SEQ ID | SEQ ID | |
| | | ASSVKGRFTISRDNAGNTGFLQMNSLRPED | | NO: 689 | NO: 690 | NO: 691 | |
| | | TAVYYCAAREGGVVAGVRSGAPYDYWGQGT | | | | | |
| | | QVTVSP- | | | | | |
| | | SEQ ID | | | | | |
| | | NO: 75 | | | | | |
| 386 | 76 | QVQLVESGGGLVQAGGSLRLSCAASGITFN | a64 | DHTMA- | ARDWSDIITRYASSVKG- | REGGVVAGVRSGAPYDY- | 13 |
| | | DHTMAWFRQAPGKEREFVAARDWSDIITRY | | SEQ ID | SEQ ID | SEQ ID | |
| | | ASSVKGRFTISRDNAGNTGFLQMNSLRPED | | NO: 692 | NO: 693 | NO: 694 | |
| | | TAVYYCAAREGGVVAGVRSGAPYDYWG* | | | | | |
| | | GTQVTVSS-SEQ ID | | | | | |
| | | NO: 76 | | | | | |
| 392 | 77 | EVQLVESGGGLVQAGGSLRLSCAASGITFN | a10 | DHTMA- | ARDWSDIITRYASSVKG- | REGGVVAGVRSGAPYDY- | 13 |
| | | DHTMAWFRQAPGKEREFVAARDWSDIITRY | | SEQ ID | SEQ ID | SEQ ID | |
| | | ASSVKGRFTISRDNAGNTGFLQMNSLRPED | | NO: 695 | NO: 696 | NO: 697 | |
| | | TAVYYCAAREGGVVAGVRSGAPYDYWGQGT | | | | | |
| | | QVTVSS- | | | | | |
| | | SEQ ID | | | | | |
| | | NO: 77 | | | | | |
| 400 | 78 | EVQLVESGGGLVQAGGSLRLSCAASGITFN | a9 | DHTMA- | ARDWSDIITRYAGSVKG- | REGGVVAGVRSGAPYDY- | 13 |
| | | DHTMAWFRQAPGKEREFVAARDWSDIITRY | | SEQ ID | SEQ ID | SEQ ID | |
| | | AGSVKGRFTISRDNAGNTGFLQMNSLRPED | | NO: 698 | NO: 699 | NO: 700 | |
| | | TAVYYCAAREGGVVAGVRSGAPYDYWGQGT | | | | | |
| | | QVTVSS- | | | | | |
| | | SEQ ID | | | | | |
| | | NO: 78 | | | | | |
| 402 | 79 | QVQLQESGGGLVQPGGSLRLSCAASGITFN | a50 | DHTMA- | ARDWSDIITRYASSVKG- | REGGVVAGVRSGAPYDY- | 13 |
| | | DHTMAWFRQAPGKEREFVAARDWSDIITRY | | SEQ ID | SEQ ID | SEQ ID | |
| | | ASSVKGRFTISRDNAGNTGFLQMNSLRPED | | NO: 701 | NO: 702 | NO: 703 | |
| | | TAVYYCAAREGGVVAGVRSGAPYDYWGQGT | | | | | |
| | | QVTVSS- | | | | | |
| | | SEQ ID | | | | | |
| | | NO: 79 | | | | | |
| 405 | 80 | EVQLVESGGGLVQAGGSLRLSCAASGRTLY | a14 | SSYGMA- | SISRYGTYTSYADSVKD- | YTYSGSFYSTVKTHRDEYQY- | 15 |
| | | SSYGMAWFRQAPGKERDFVGSISRYGTYTS | | SEQ ID | SEQ ID | SEQ ID | |
| | | YADSVKDRFTISRDNAKSTVYLQMNNTKPE | | NO: 704 | NO: 705 | NO: 706 | |
| | | DTAVYYCAAYTYSGSFYSTVKTHRDEYQYW | | | | | |
| | | GQGTQVTVSS- | | | | | |
| | | SEQ ID | | | | | |
| | | NO: 80 | | | | | |
| 411 | 81 | EVQLVESGGGSVQAGGSLRLSCEASGRTLF | a22 | SSYGMG- | AISRFGTYTSYADPVKD- | YTYSGSFYSTVKTHHDEYRY- | 15 |
| | | SSYGMGWFRQAPGKEREFVGAISRFGTYTS | | SEQ ID | SEQ ID | SEQ ID | |
| | | YADPVKDRFTISRDNAKSTVYLQMNNTKPE | | NO: 707 | NO: 708 | NO: 709 | |
| | | DTAVYYCAAYTYSGSFYSTVKTHHDEYRYW | | | | | |
| | | GQGTQVTVSS- | | | | | |
| | | SEQ ID | | | | | |
| | | NO: 81 | | | | | |
| 412 | 82 | QLQLVESGGGLVQAGGSLRLSCAASGLTFD | a35 | GYAIG- | YINGRDGSTFYADSVKG- | DRLGSRGAYVSSWWRSPDMDL- | 4 |
| | | GYAIGWFRQASGKEREGVSYINGRDGSTFY | | SEQ ID | SEQ ID | SEQ ID | |
| | | ADSVKGRFIISSDNAKNTVDLQMNSLNPDD | | NO: 710 | NO: 711 | NO: 712 | |
| | | AAVYYCAVDRLGSRGAYVSSWWRSPDMDLW | | | | | |
| | | GKGTLVTVSS- | | | | | |
| | | SEQ ID | | | | | |
| | | NO: 82 | | | | | |
| 413 | 83 | QVQLVESGGGLVQAGGSLRLSCAASGGTFR | a62 | TRNMG- | AVSWSVDNKLYAGSVKG- | DNIPLSSDMRPTATEFGY- | 6 |
| | | TRNMGWFRRAPGKEREFVAAVSWSVDNKLY | | SEQ ID | SEQ ID | SEQ ID | |
| | | AGSVKGRFTISRDNGRNMVYLQMNSLKPED | | NO: 713 | NO: 714 | NO: 715 | |
| | | TAVYYCAADNIPLSSDMRPTATEFGYWGQG | | | | | |
| | | TRVTVSS- | | | | | |
| | | SEQ ID | | | | | |
| | | NO: 83 | | | | | |
| 417 | 84 | QLQLVESGGGLVQAGGSLRLSCAASGLTFD | a33 | GYAIG- | YINGRDGSTFYADSVKG- | DRLGSRGAYVSTWWRPPDMDL- | 4 |
| | | GYAIGWFRQASGKEREGVSYINGRDGSTFY | | SEQ ID | SEQ ID | SEQ ID | |
| | | ADSVKGRFIISSDNAKNTVDLQMNSLKPDD | | NO: 716 | NO: 717 | NO: 718 | |
| | | AAVYYCAVDRLGSRGAYVSTWWRPPDMDLW | | | | | |
| | | GKGTLVTVSP- | | | | | |
| | | SEQ ID | | | | | |
| | | NO: 84 | | | | | |
| 418 | 85 | EVQLVESGGGLVQAGGSLRLSCAASGFTFD | a5 | GYAVG- | YITGSDGVTYYIDSVKG- | DRLGSQGRYASSWWRAGDMDF- | 4 |
| | | GYAVGWFRQAPGKEPEGVSYITGSDGVTYY | | SEQ ID | SEQ ID | SEQ ID | |
| | | IDSVKGRFTISSDNAKRTVYLQMNTLKPED | | NO: 719 | NO: 720 | NO: 721 | |
| | | TAVYYCAVDRLGSQGRYASSWWRAGDMDFW | | | | | |
| | | GKGTLVTVSS- | | | | | |
| | | SEQ ID | | | | | |
| | | NO: 85 | | | | | |
| 424 | 86 | QVQLVESGGGLVQAGDSLRLSCAASGFNFG | a54 | WHAMG- | TITWTGRDTYYADSVRG- | ARERATWAYSEDDCDY- | 1 |
| | | WHAMGWFRQAPGKEREFVATITWTGRDTYY | | SEQ ID | SEQ ID | SEQ ID | |
| | | ADSVRGRFTISKDNAKNTLFLQMSSLRPDD | | NO: 722 | NO: 723 | NO: 724 | |
| | | TGVYYCAKARERATWAYSEDDCDYWGQGTQ | | | | | |
| | | VTVSS- | | | | | |
| | | SEQ ID | | | | | |
| | | NO: 86 | | | | | |
| 427 | 87 | QVQLVESGGGLVQAGGSLRLSCAASGLTFD | a67 | GYAIG- | YINGRDGSTFYTDSVKG- | DRLGSRGAYVSSWWRSPDMDL- | 4 |
| | | GYAIGWFRQASGKEREGVSYINGRDGSTFY | | SEQ ID | SEQ ID | SEQ ID | |
| | | TDSVKGRFIISSDNAKNTVDLQMNSLKPDD | | NO: 725 | NO: 726 | NO: 727 | |
| | | AAVYYCAVDRLGSRGAYVSSWWRSPDMDLW | | | | | |
| | | GKGTLVTVSS- | | | | | |
| | | SEQ ID | | | | | |
| | | NO: 87 | | | | | |
| 428 | 88 | QVQLVESGGGLVQAGDSLRLSCAASGFNFG | a53 | WHAMG- | TITWTGRDTYYADSVRG- | ARERATWAYSEDDCDY- | 1 |
| | | WHAMGWFRQAPGKEREFVATITWTGRDTYY | | SEQ ID | SEQ ID | SEQ ID | |
| | | ADSVRGRFTISKDNAKDTLFLQMNSLRPDD | | NO: 728 | NO: 729 | NO: 730 | |
| | | TGVYYCAKARERATWAYSEDDCDYWGQGTQ | | | | | |
| | | VTVSS- | | | | | |
| | | SEQ ID | | | | | |
| | | NO: 88 | | | | | |
| 430 | 89 | EVQLVESGGGLVQAGDSLRLSCAASGFNFG | a1 | WHAMG- | TITWTGRDTYYADSVRG- | ARERATWAYSEDDCDY- | 1 |
| | | WHAMGWFRQAPGKEREFVATITWTGRDTYY | | SEQ ID | SEQ ID | SEQ ID | |
| | | ADSVRGRFTISKDNAKDTLFLQMNSLRPDD | | NO: 731 | NO: 732 | NO: 733 | |
| | | TGVYYCAKARERATWAYSEDDCDYWGQGTQ | | | | | |
| | | VTVSS- | | | | | |
| | | SEQ ID | | | | | |
| | | NO: 89 | | | | | |
| 433 | 90 | QVQLVESGGGLAQAGASLRLSCAASGRTLY | a51 | SSYGMA- | SISRYGTYTSYADSVKG- | YTYSGSFYSTVKTHRDEYQY- | 15 |
| | | SSYGMAWFRQAPGKERDFVGSISRYGTYTS | | SEQ ID | SEQ ID | SEQ ID | |
| | | YADSVKGRFTISRDNAKSTVYLQMNNTKPE | | NO: 734 | NO: 735 | NO: 736 | |
| | | DTAVYYCAAYTYSGSFYSTVKTHRDEYQYW | | | | | |
| | | GQGTQVTVSS- | | | | | |
| | | SEQ ID | | | | | |
| | | NO: 90 | | | | | |
| 434 | 91 | QLQLVESGGGLVQAGGSLRLSCAASGLTFD | a32 | GYAIG- | YINGRDGSTFYADSVKG- | DRLGSRGAYVSSWWRSPDMDL- | 4 |
| | | GYAIGWFRQASGKEREGVSYINGRDGSTFY | | SEQ ID | SEQ ID | SEQ ID | |
| | | ADSVKGRFIISSDNAKNTVDLQMNSLKPDD | | NO: 737 | NO: 738 | NO: 739 | |
| | | AAVYYCAVDRLGSRGAYVSSWWRSPDMDLW | | | | | |
| | | GKGTLVTVSS- | | | | | |
| | | SEQ ID | | | | | |
| | | NO: 91 | | | | | |
| 435 | 92 | QVQLVESGGGSVQAGGSLRLSCEASGRTLF | a85 | SSYGMG- | AISRFGTYTSYADPVKD- | YTYSGSFYSTVKTHHDEYRY- | 15 |
| | | SSYGMGWFRQAPGKEREFVGAISRFGTYTS | | SEQ ID | SEQ ID | SEQ ID | |
| | | YADPVKDRFTISRDNAKSTVYLQMNNTKPE | | NO: 740 | NO: 741 | NO: 742 | |
| | | DTAVYYCAAYTYSGSFYSTVKTHHDEYRYW | | | | | |
| | | GQGTQVTVSS- | | | | | |
| | | SEQ ID | | | | | |
| | | NO: 92 | | | | | |
| 442 | 93 | QLQLVESGGGLVQAGGSLRLSCVAHGLTFD | a40 | GYAIG- | YITGSDGSRYYADSVKG- | DRLGSRGAYVSAWWRSSDMDL- | 4 |
| | | GYAIGWFRQAPGKELEGVSYITGSDGSRYY | | SEQ ID | SEQ ID | SEQ ID | |
| | | ADSVKGRFTISSDVAKNTVYLHMNNLKPDD | | NO: 743 | NO: 744 | NO: 745 | |
| | | AARYYCAVDRLGSRGAYVSAWWRSSDMDLW | | | | | |
| | | GKGTLVTVSS- | | | | | |
| | | SEQ ID | | | | | |
| | | NO: 93 | | | | | |
| 445 | 94 | EVQLVESGGGSVQAGGSLRLSCEASGPTLF | a21 | SSYGMG- | AISRYGTYTSYADPVKD- | YTYSGSFYSTVKTHHDEYHY- | 15 |
| | | SSYGMGWFRQAPGKKEREFVGAISRYGTYT | | SEQ ID | SEQ ID | SEQ ID | |
| | | SYADPVKDRFTISRDNAKSTVYLQMNNTKP | | NO: 746 | NO: 747 | NO: 748 | |
| | | EDTAVYYCAAYTYSGSFYSTVKTHHDEYHY | | | | | |
| | | WGQGTQVTVSS- | | | | | |
| | | SEQ ID | | | | | |
| | | NO: 94 | | | | | |
| 447 | 95 | QLQLVESGGGLVQAGGSLRLSCTASGLTFE | a39 | GYAIG- | YITGSDASTYYIDSVKG- | DRLGSRGGYASSWWRSGDMDL- | 4 |
| | | GYAIGWFRQAPGKEREGVSYITGSDASTYY | | SEQ ID | SEQ ID | SEQ ID | |
| | | IDSVKGRFTISSDFAKSTVYLQMNNLKPED | | NO: 749 | NO: 750 | NO: 751 | |
| | | TAVYYCAVDRLGSRGGYASSWWRSGDMDLW | | | | | |
| | | GKGTLVTVSS- | | | | | |
| | | SEQ ID | | | | | |
| | | NO: 95 | | | | | |
| 448 | 96 | QLQLVESGGGLVQAGGSLRLSCAASGLTFD | a34 | GYAIG- | YINGRDGSTFYADSVKG- | DRLGSRGAYVSTWWRSPDMDL- | 4 |
| | | GYAIGWFRQASGKEREGVSYINGRDGSTFY | | SEQ ID | SEQ ID | SEQ ID | |
| | | ADSVKGRFIISSDNAKNTVDLQMNSLKPDD | | NO: 752 | NO: 753 | NO: 754 | |
| | | AAVYYCAVDRLGSRGAYVSTWWRSPDMDLW | | | | | |
| | | GKGTLVTVSS- | | | | | |
| | | SEQ ID | | | | | |
| | | NO: 96 | | | | | |
| 451 | 97 | QLQLVESGGGLVQAGGSLRLSCAASGFTFD | a30 | GYAIG- | YITGSDGSTYYADSVKG- | DRLGSRGAYVPIWWRSSDMDL- | 4 |
| | | GYAIGWFRQAPGKEREGVSYITGSDGSTYY | | SEQ ID | SEQ ID | SEQ ID | |
| | | ADSVKGRFTISSNNAKNTVYLHMNSLKPDD | | NO: 755 | NO: 756 | NO: 757 | |
| | | AAVYYCAIDRLGSRGAYVPIWWRSSDMDLW | | | | | |
| | | GKGTLVTVSS- | | | | | |
| | | SEQ ID | | | | | |
| | | NO: 97 | | | | | |
| 456 | 98 | QLQLVESGGDLVQPGGSLRLSCTASGLTFD | a26 | GYAIG- | YITGSNGSTYYIDSVKG- | DRLGSRGLYASSWWRSGDMDL- | 4 |
| | | GYAIGWFRQAPGKEREGVSYITGSNGSTYY | | SEQ ID | SEQ ID | SEQ ID | |
| | | IDSVKGRFTISSDIAKSTVYLQMNTLKPED | | NO: 758 | NO: 759 | NO: 760 | |
| | | TAVYYCAVDRLGSRGLYASSWWRSGDMDLW | | | | | |
| | | GKGTLVTVSS- | | | | | |
| | | SEQ ID | | | | | |
| | | NO: 98 | | | | | |
| 457 | 99 | QLQLVESGGGLVQAGGSLRLSCTASGLTFD | a38 | GYAIG- | YITGSDGSTYYIDSVKG- | DRLGSRGLYASSWWRSGDMDL- | 4 |
| | | GYAIGWFRQAPGKEREGVSYITGSDGSTYY | | SEQ ID | SEQ ID | SEQ ID | |
| | | IDSVKGRFTISSDIAKSTVYLQMNSLKPED | | NO: 761 | NO: 762 | NO: 763 | |
| | | TAVYYCAVDRLGSRGLYASSWWRSGDMDLW | | | | | |
| | | GKGTLVTVSS- | | | | | |
| | | SEQ ID | | | | | |
| | | NO: 99 | | | | | |
| 459 | 100 | QLQLVESGGGLVQTGGSLRLSCSTSGFTFD | a41 | GYAIG- | YITGSDGSTYYADSVKG- | DRLGSGGAYVPIWWRSSDMDL- | 4 |
| | | GYAIGWFRQAPGKEPEGVSYITGSDGSTYY | | SEQ ID | SEQ ID | SEQ ID | |
| | | ADSVKGRFTISSDNAKNTVYLHMNSLKPDD | | NO: 764 | NO: 765 | NO: 766 | |
| | | AAVYYCAIDRLGSGGAYVPIWWRSSDMDLW | | | | | |
| | | GKGTLVTVSS- | | | | | |
| | | SEQ ID | | | | | |
| | | NO: 100 | | | | | |
| 460 | 101 | QVQLVESGGGLVQAGGSLRLSCTASGLTFD | a72 | GYAIG- | YITGSDGSTYYRDSVKG- | DRLGSRGLYASSWWRSGDMDL- | 4 |
| | | GYAIGWFRQAPGKEREGVSYITGSDGSTYY | | SEQ ID | SEQ ID | SEQ ID | |
| | | RDSVKGRFTISSDNAKSTVYLQMNTLKPED | | NO: 767 | NO: 768 | NO: 769 | |
| | | TAVYYCAVDRLGSRGLYASSWWRSGDMDLW | | | | | |
| | | GKGTLVTVSS- | | | | | |
| | | SEQ ID | | | | | |
| | | NO: 101 | | | | | |
| 461 | 102 | EVQLVESGGGLVQAGGSLRLSCTASGLTFD | a16 | GYAIG- | YITGSDGSTYYIDSVKG- | DRLGSRGLYASSWWRSGDMDL- | 4 |
| | | GYAIGWFRQAPGKEREGVSYITGSDGSTYY | | SEQ ID | SEQ ID | SEQ ID | |
| | | IDSVKGRFTISSDIAKSTVYLQMNSLKPED | | NO: 770 | NO: 771 | NO: 772 | |
| | | TAVYYCAVDRLGSRGLYASSWWRSGDMDLW | | | | | |
| | | GKGTLVTVSS- | | | | | |
| | | SEQ ID | | | | | |
| | | NO: 102 | | | | | |
| 467 | 103 | QVQLVESGGGLVQAGGSLRLSCTASGLTFE | a73 | GYAIG- | YITGSDASTYYIDSVKG- | DRLGSRGGYASSWWRSGDMDL- | 4 |
| | | GYAIGWFRQAPGKEREGVSYITGSDASTYY | | SEQ ID | SEQ ID | SEQ ID | |
| | | IDSVKGRFTISSDFAKSTVYLQMNNLKPED | | NO: 773 | NO: 774 | NO: 775 | |
| | | TAVYYCAVDRLGSRGGYASSWWRSGDMDLW | | | | | |
| | | GKGTLVTVSS- | | | | | |
| | | SEQ ID | | | | | |
| | | NO: 103 | | | | | |
| 468 | 104 | QVQLVESGGGSVQAGGSLRLSCEASGPTLF | a84 | SSYGMG- | AISRYGTYTSYADPVKD- | YTYSGSFYSTVKTHHDEYHY- | 15 |
| | | SSYGMGWFRQAPGKKEREFVGAISRYGTYT | | SEQ ID | SEQ ID | SEQ ID | |
| | | SYADPVKDRLTISRGNAKSTVYLQMNNTKP | | NO: 776 | NO: 777 | NO: 778 | |
| | | EDTAVYYCAAYTYSGSFYSTVKTHHDEYHY | | | | | |
| | | WGQGTQVTVSS- | | | | | |
| | | SEQ ID | | | | | |
| | | NO: 104 | | | | | |
| 469 | 105 | EVQLVESGGGSVQAGGSLRLSCAASGRTLY | a20 | SSYGMA- | SISRYGTYTSYADSVKD- | YTYSGSFYSTVKTHRDEYQY- | 15 |
| | | SSYGMAWFRQAPGKERDFVGSISRYGTYTS | | SEQ ID | SEQ ID | SEQ ID | |
| | | YADSVKDRFTISRDNAKSTVYLQMNNTKPE | | NO: 779 | NO: 780 | NO: 781 | |
| | | DTAVYYCAAYTYSGSFYSTVKTHRDEYQYW | | | | | |
| | | GQGTQVTVSS- | | | | | |
| | | SEQ ID | | | | | |
| | | NO: 105 | | | | | |
| 470 | 106 | QVQLVESGGGSVQAGGSLRLSCAASGRTLY | a83 | SSYGMA- | SISRYGTYTSYADSVKD- | YTYSGSFYSAVKTHRDEYQY- | 15 |
| | | SSYGMAWFRQAPGKERDFVGSISRYGTYTS | | SEQ ID | SEQ ID | SEQ ID | |
| | | YADSVKDRFTISRDNAKSTVYLQMNNTKPE | | NO: 782 | NO: 783 | NO: 784 | |
| | | DTAVYYCAAYTYSGSFYSAVKTHRDEYQYW | | | | | |
| | | GQGTQVTVSS- | | | | | |
| | | SEQ ID | | | | | |
| | | NO: 106 | | | | | |
| 475 | 107 | EVQLVESGGGLVQAGDSLRLSCAASGFNFG | a2 | WHAMG- | TITWTGRDTYYADSVRG- | ARERATWAYSEDDCDY- | 1 |
| | | WHAMGWFRQAPGKEREFVATITWTGRDTYY | | SEQ ID | SEQ ID | SEQ ID | |
| | | ADSVRGRFTISKDNAKNTLFLQMSSLRPDD | | NO: 785 | NO: 786 | NO: 787 | |
| | | TGVYYCAKARERATWAYSEDDCDYWGQGTQ | | | | | |
| | | VTVSS- | | | | | |
| | | SEQ ID | | | | | |
| | | NO: 107 | | | | | |
| 476 | 108 | QLQLVESGGGSVQAGGSLRLSCAASGRTLY | a42 | SSYGMA- | SISRYGTYTSYADSVKD- | YTYSGSFYSTVKTHRDEYQY- | 15 |
| | | SSYGMAWFRQAPGKERDFVGSISRYGTYTS | | SEQ ID | SEQ ID | SEQ ID | |
| | | YADSVKDRFTISRDNAKSTVYLQMNNTKPE | | NO: 788 | NO: 789 | NO: 790 | |
| | | DTAVYYCAAYTYSGSFYSTVKTHRDEYQYW | | | | | |
| | | GQGTQVTVSS- | | | | | |
| | | SEQ ID | | | | | |
| | | NO: 108 | | | | | |
| 477 | 109 | QLQLVESGGGLVQAGDSLRLSCAASGFNFG | a27 | WHAMG- | TITWTGRDTYYADSVRG- | ARERATWAYSEDDCDY- | 1 |
| | | WHAMGWFRQAPGKEREFVATITWTGRDTYY | | SEQ ID | SEQ ID | SEQ ID | |
| | | ADSVRGRFTISKDNAKDTLFLQMNSLRPDD | | NO: 791 | NO: 792 | NO: 793 | |
| | | TGVYYCAKARERATWAYSEDDCDYWGQGTQ | | | | | |
| | | VTVSS- | | | | | |
| | | SEQ ID | | | | | |
| | | NO: 109 | | | | | |
| 478 | 110 | QLQLVESGGGLVQAGGSLRLSCLASGLTFD | a37 | GYAIG- | YITGSDGSSYYADSVKG- | DHLGSRGGYHSSWWRSSDMDL- | 4 |
| | | GYAIGWFRQAPGKELEGVSYITGSDGSSYY | | SEQ ID | SEQ ID | SEQ ID | |
| | | ADSVKGRFTISSDNAKNTVYLHMNSLKPDD | | NO: 794 | NO: 795 | NO: 796 | |
| | | AAVYYCAIDHLGSRGGYHSSWWRSSDMDLW | | | | | |
| | | GKGTLVTVSS- | | | | | |
| | | SEQ ID | | | | | |
| | | NO: 110 | | | | | |

TABLE 8

| | ascending | | | P.E. binding | | P.E. Off-rate ranking SPR- | | | |
|---|---|---|---|---|---|---|---|---|---|
| | numbering | | | ELISA | | mouse and human IL-2Ra | | | |
| Clone | Patent | | | hu | mo | Rmax- | hd(1/s)- | Rmax- | kd (1/s)- |
| nr. | clone ID | V ID | Clone ID | IL-2R | IL-2R | hu | hu | mo | mo |
| 115 | 14 | 14-MP02C03 | FJ1427 P035MP02C03 | 0.183 | 0.047 | 254.63 | 7.14E−04 | 3.85 | N/A |
| 141 | 15 | 15-MP02E06 | FJ1427 P035MP02E06 | 0.581 | 0.048 | 88.25 | 1.69E−03 | 3.25 | N/A |
| 154 | 16 | 16-MP02B08 | FJ1427_P035MP02B08 | 1.379 | 0.048 | 134.82 | 1.41E−04 | 2.5 | N/A |
| 163 | 17 | 17-MP02C09 | FJ1427_P035MP02C09 | 1.205 | 0.047 | 99.83 | 8.48E−04 | −4.22 | N/A |
| 211 | 18 | 18-MP03C03 | FJ1427_P035MP03C03 | 0.405 | 0.048 | 124.58 | 5.94E−04 | 13.86 | N/A |
| 254 | 19 | 19-MP03F08 | FJ1427_P035MP03F08 | 0.245 | 0.049 | 386.6 | 2.96E−04 | 5.01 | N/A |
| 270 | 20 | 20-MP03F10 | FJ1427_P035MP03F10 | 0.497 | 0.048 | 51.52 | 5.95E−04 | 6.86 | N/A |
| 281 | 21 | 21-MP03A12 | FJ1427 P035MP03A12 | 0.146 | 0.050 | 95.17 | 6.28E−03 | 7.01 | N/A |
| 286 | 22 | 22-MP03F12 | FJ1427_P035MP03F12 | 0.781 | 0.048 | 166.58 | 4.19E−04 | 4.04 | N/A |
| 502 | 23 | 23-MP06F03 | FJ1427_P035MP06F03 | 0.540 | 0.047 | 466.68 | 1.05E−03 | 28.66 | 1.93E−01 |
| 517 | 24 | 24-MP06E05 | FJ1427 P035MP06E05 | 0.355 | 0.046 | 315.21 | 4.71E−04 | 9.06 | N/A |
| 518 | 25 | 25-MP06F05 | FJ1427_P035MP06F05 | 0.159 | 0.047 | 200.28 | 8.36E−04 | 14.57 | N/A |
| 529 | 26 | 26-MP06A07 | FJ1427_P035MP06A07 | 1.027 | 0.048 | 451.44 | 3.63E−04 | 45.6 | 8.17E−03 |
| 97 | 111 | | FJ1427_P035MP02A01 | 0.311 | 0.048 | 363.33 | 2.30E−04 | 3.09 | N/A |
| 98 | 112 | | FJ1427_P035MP02B01 | 0.271 | 0.048 | 374.77 | 1.19E−04 | 7.83 | N/A |
| 99 | 113 | | FJ1427 P035MP02C01 | 0.700 | 0.047 | 377.07 | 7.89E−04 | 5.4 | N/A |
| 100 | 114 | | FJ1427 P035MP02D01 | 0.573 | 0.048 | 379.16 | 1.67E−04 | 6.12 | N/A |
| 101 | 115 | | FJ1427_P035MP02E01 | 1.111 | 0.049 | 392.8 | 4.50E−05 | 4.79 | N/A |
| 102 | 116 | | FJ1427_P035MP02F01 | 0.469 | 0.048 | 355.79 | 3.00E−04 | 4.93 | N/A |
| 103 | 117 | | FJ1427_P035MP02G01 | 0.169 | 0.049 | 314.66 | 3.68E−04 | 6.13 | N/A |
| 104 | 118 | | FJ1427_P035MP02H01 | 0.487 | 0.051 | 65.91 | 1.06E−03 | 4.83 | N/A |
| 105 | 119 | | FJ1427_P035MP02A02 | 0.223 | 0.049 | 77.21 | 2.62E−03 | 1.29 | N/A |
| 106 | 120 | | FJ1427_P035MP02B02 | 0.343 | 0.048 | 355.19 | 1.64E−04 | 4.82 | N/A |
| 107 | 121 | | FJ1427_P035MP02C02 | 0.401 | 0.048 | 268.38 | 5.70E−04 | 2.26 | N/A |
| 108 | 122 | | FJ1427 P035MP02D02 | 0.831 | 0.048 | 101.36 | 5.29E−04 | −0.13 | N/A |
| 109 | 123 | | FJ1427 P035MP02E02 | 0.254 | 0.049 | 324.42 | 2.69E−04 | 0.97 | N/A |
| 110 | 124 | | FJ1427 P035MP02F02 | 0.684 | 0.052 | 405.52 | 6.17E−04 | 7.09 | N/A |
| 111 | 125 | | FJ1427 P035MP02G02 | 0.177 | 0.049 | 349.11 | 1.12E−04 | 0.48 | N/A |
| 113 | 126 | | FJ1427_P035MP02A03 | 0.207 | 0.048 | 128.98 | 5.71E−04 | 1.39 | N/A |
| 114 | 127 | | FJ1427_P035MP02B03 | 0.383 | 0.048 | 335.78 | 2.15E−04 | −0.68 | N/A |
| 116 | 128 | | FJ1427_P035MP02D03 | 0.286 | 0.048 | 154.36 | 2.26E−04 | 0.65 | N/A |
| 117 | 129 | | FJ1427_P035MP02E03 | 0.242 | 0.049 | 302.37 | 1.69E−04 | 2.37 | N/A |
| 118 | 130 | | FJ1427_P035MP02F03 | 0.212 | 0.048 | 40.26 | 8.28E−04 | 2.77 | N/A |
| 119 | 131 | | FJ1427_P035MP02G03 | 0.197 | 0.049 | 25.37 | 2.93E−03 | −1.36 | N/A |
| 121 | 132 | | FJ1427 P035MP02A04 | 0.533 | 0.048 | 310.86 | 3.68E−04 | −0.8 | N/A |
| 122 | 133 | | FJ1427_P035MP02B04 | 0.375 | 0.047 | 77.27 | 4.49E−04 | 5.08 | N/A |
| 123 | 134 | | FJ1427_P035MP02C04 | 0.424 | 0.047 | 30.61 | 2.55E−03 | 2.91 | N/A |
| 124 | 135 | | FJ1427_P035MP02D04 | 0.447 | 0.048 | 356.6 | 3.58E−04 | 1.79 | N/A |
| 125 | 136 | | FJ1427_P035MP02E04 | 0.255 | 0.048 | 57.74 | 7.16E−04 | 4.96 | N/A |
| 126 | 137 | | FJ1427 P035MP02F04 | 0.516 | 0.048 | 332.62 | 3.43E−04 | 1.14 | N/A |
| 127 | 138 | | FJ1427_P035MP02G04 | 0.549 | 0.048 | 337.42 | 2.95E−04 | 0.95 | N/A |
| 128 | 139 | | FJ1427 P035MP02H04 | 0.376 | 0.050 | 77.91 | 5.10E−04 | −1.02 | N/A |
| 129 | 140 | | FJ1427_P035MP02A05 | 0.263 | 0.047 | 332.02 | 4.44E−04 | −1.23 | N/A |
| 130 | 141 | | FJ1427_P035MP02B05 | 0.553 | 0.048 | 343.63 | 2.92E−04 | 2.11 | N/A |
| 131 | 142 | | FJ1427 P035MP02C05 | 0.237 | 0.047 | 342.81 | 3.46E−04 | 3.8 | N/A |
| 132 | 143 | | FJ1427 P035MP02D05 | 0.118 | 0.049 | 103.1 | 2.79E−03 | 4.1 | N/A |
| 133 | 144 | | FJ1427_P035MP02E05 | 0.856 | 0.048 | 116.74 | 3.10E−04 | 3.63 | N/A |
| 134 | 145 | | FJ1427_P035MP02F05 | 0.206 | 0.048 | 355.08 | 3.34E−04 | 1.96 | N/A |
| 135 | 146 | | FJ1427 P035MP02G05 | 0.567 | 0.048 | 299.07 | 4.32E−04 | −1.49 | N/A |
| 136 | 147 | | FJ1427 P035MP02H05 | 0.192 | 0.049 | 277.67 | 2.68E−04 | −0.33 | N/A |
| 137 | 148 | | FJ1427_P035MP02A06 | 2.552 | 0.048 | 84.18 | 4.84E−04 | 0.61 | N/A |
| 138 | 149 | | FJ1427_P035MP02B06 | 0.125 | 0.047 | 29.02 | 4.60E−03 | 4.29 | N/A |
| 139 | 150 | | FJ1427 P035MP02C06 | 0.351 | 0.047 | 53 | 2.17E−03 | 3.82 | N/A |
| 140 | 151 | | FJ1427_P035MP02D06 | 0.298 | 0.047 | 345.4 | 3.74E−04 | 2 | N/A |
| 142 | 152 | | FJ1427_P035MP02F06 | 0.214 | 0.047 | 349.21 | 2.03E−04 | 2.53 | N/A |
| 145 | 153 | | FJ1427 P035MP02A07 | 0.791 | 0.049 | 423.04 | 2.11E−03 | 24.52 | 2.58E−01 |
| 146 | 154 | | FJ1427 P035MP02B07 | 0.380 | 0.046 | 140.58 | 3.36E−04 | 14.48 | N/A |
| 147 | 155 | | FJ1427_P035MP02C07 | 0.731 | 0.046 | 47.68 | 2.31E−03 | 10.64 | N/A |
| 148 | 156 | | FJ1427_P035MP02D07 | 0.747 | 0.046 | 64.76 | 9.82E−04 | 9.64 | N/A |
| 149 | 157 | | FJ1427_P035MP02E07 | 0.541 | 0.071 | 421.92 | 5.77E−04 | 23.81 | 3.28E−01 |
| 150 | 158 | | FJ1427 P035MP02F07 | 0.848 | 0.055 | 428.4 | 1.64E−03 | 25 | 3.77E−01 |
| 151 | 159 | | FJ1427_P035MP02G07 | 0.636 | 0.079 | 426.77 | 2.59E−04 | 46.84 | 1.29E−01 |
| 153 | 160 | | FJ1427_P035MP02A08 | 1.789 | 0.069 | 407.46 | 1.98E−03 | 5.67 | N/A |
| 155 | 161 | | FJ1427 P035MP02C08 | 0.254 | 0.047 | 71.07 | 3.33E−03 | −1.01 | N/A |
| 156 | 162 | | FJ1427 P035MP02D08 | 0.905 | 0.048 | 402.37 | 2.36E−03 | −0.73 | N/A |
| 157 | 163 | | FJ1427_P035MP02E08 | 0.450 | 0.058 | 398.11 | 8.46E−04 | 4.56 | N/A |
| 158 | 164 | | FJ1427_P035MP02F08 | 0.614 | 0.048 | 154.09 | 1.53E−03 | −2.21 | N/A |
| 159 | 165 | | FJ1427 P035MP02G08 | 0.441 | 0.055 | 419.38 | 1.78E−03 | 14.44 | N/A |
| 160 | 166 | | FJ1427_P035MP02H08 | 0.885 | 0.049 | 175.83 | 7.31E−04 | −1.64 | N/A |
| 161 | 167 | | FJ1427_P035MP02A09 | 1.299 | 0.053 | 431.17 | 6.17E−04 | 31.11 | 3.11E−01 |
| 162 | 168 | | FJ1427_P035MP02B09 | 0.811 | 0.047 | 148.47 | 2.20E−04 | −3.61 | N/A |
| 164 | 169 | | FJ1427 P035MP02D09 | 1.474 | 0.056 | 434.6 | 4.98E−04 | 11.47 | N/A |
| 166 | 170 | | FJ1427_P035MP02F09 | 1.468 | 0.051 | 422.26 | 1.07E−03 | 12.98 | N/A |
| 167 | 171 | | FJ1427_P035MP02G09 | 0.527 | 0.066 | 419.2 | 1.10E−03 | 4.38 | N/A |
| 168 | 172 | | FJ1427 P035MP02H09 | 1.510 | 0.049 | 172.49 | 1.41E−04 | −1.81 | N/A |
| 169 | 173 | | FJ1427 P035MP02A10 | 0.359 | 0.047 | 109.6 | 2.26E−03 | 0.77 | N/A |
| 170 | 174 | | FJ1427_P035MP02B10 | 0.476 | 0.047 | 152.72 | 2.84E−04 | 1.29 | N/A |
| 171 | 175 | | FJ1427_P035MP02C10 | 1.286 | 0.050 | 426.67 | 5.21E−04 | 9.46 | N/A |
| 172 | 176 | | FJ1427 P035MP02D10 | 0.557 | 0.047 | 96.27 | 1.09E−03 | 1.99 | N/A |
| 173 | 177 | | FJ1427_P035MP02E10 | 1.389 | 0.047 | 80.54 | 6.15E−04 | −3.94 | N/A |
| 174 | 178 | | FJ1427_P035MP02F10 | 0.595 | 0.051 | 400.6 | 7.88E−04 | 5.82 | N/A |
| 175 | 179 | | FJ1427_P035MP02G10 | 0.974 | 0.048 | 135.75 | 3.07E−04 | −3.41 | N/A |
| 176 | 180 | | FJ1427 P035MP02H10 | 0.435 | 0.051 | 406.01 | 7.57E−04 | 7.4 | N/A |
| 177 | 181 | | FJ1427_P035MP02A11 | 0.891 | 0.047 | 94.42 | 2.93E−04 | −1.82 | N/A |
| 179 | 182 | | FJ1427 P035MP02C11 | 1.570 | 0.060 | 440.23 | 4.33E−04 | 27.13 | 1.48E−01 |
| 180 | 183 | | FJ1427 P035MP02D11 | 0.463 | 0.047 | 102.96 | 8.33E−04 | −0.99 | N/A |
| 181 | 184 | | FJ1427 P035MP02E11 | 0.529 | 0.048 | 83.65 | 1.88E−03 | −0.86 | N/A |
| 182 | 185 | | FJ1427_P035MP02F11 | 0.330 | 0.047 | 71.84 | 6.86E−04 | −0.4 | N/A |
| 183 | 186 | | FJ1427_P035MP02G11 | 0.429 | 0.049 | 49.11 | 7.08E−04 | −0.23 | N/A |
| 184 | 187 | | FJ1427_P035MP02H11 | 0.795 | 0.049 | 49.64 | 7.73E−04 | −0.61 | N/A |
| 185 | 188 | | FJ1427 P035MP02A12 | 0.182 | 0.047 | 38.14 | 4.51E−03 | 4.65 | N/A |
| 186 | 189 | | FJ1427 P035MP02B12 | 1.255 | 0.048 | 350.63 | 7.16E−04 | 3.42 | N/A |
| 187 | 190 | | FJ1427_P035MP02C12 | 0.616 | 0.047 | 73.65 | 1.06E−03 | −2.68 | N/A |
| 188 | 191 | | FJ1427_P035MP02D12 | 0.658 | 0.046 | 50 | 1.44E−03 | −1.26 | N/A |
| 189 | 192 | | FJ1427_P035MP02E12 | 0.108 | 0.048 | 47.66 | 1.15E−02 | 10.71 | N/A |
| 190 | 193 | | FJ1427 P035MP02F12 | 0.628 | 0.048 | 82.48 | 2.94E−03 | 2.63 | N/A |
| 194 | 194 | | FJ1427 P035MP03B01 | 0.203 | 0.050 | 272.11 | 1.10E−03 | 11.6 | N/A |
| 196 | 195 | | FJ1427 P035MP03D01 | 0.307 | 0.048 | 165.84 | 1.27E−03 | 9.91 | N/A |
| 197 | 196 | | FJ1427 P035MP03E01 | 0.329 | 0.049 | 219.11 | 3.23E−04 | 11.43 | N/A |
| 198 | 197 | | FJ1427_P035MP03F01 | 0.221 | 0.049 | 32.03 | 4.47E−03 | 9.35 | N/A |
| 199 | 198 | | FJ1427_P035MP03G01 | 0.192 | 0.049 | 78.54 | 5.80E−04 | 9.43 | N/A |
| 200 | 199 | | FJ1427_P035MP03H01 | 0.327 | 0.051 | 352.35 | 3.65E−04 | 8.93 | N/A |
| 201 | 200 | | FJ1427_P035MP03A02 | 0.280 | 0.052 | 56.22 | 1.04E−03 | 7.41 | N/A |
| 202 | 201 | | FJ1427_P035MP03B02 | 0.529 | 0.068 | 19.84 | 2.41E−03 | 5.45 | N/A |
| 203 | 202 | | FJ1427 P035MP03C02 | 0.828 | 0.048 | 26.23 | 1.59E−03 | 8.29 | N/A |
| 204 | 203 | | FJ1427 P035MP03D02 | 0.116 | 0.048 | 345.41 | 7.96E−04 | 7.24 | N/A |
| 205 | 204 | | FJ1427_P035MP03E02 | 0.488 | 0.050 | 50.08 | 1.24E−03 | 6.16 | N/A |
| 206 | 205 | | FJ1427_P035MP03F02 | 0.113 | 0.049 | 38.07 | 1.91E−03 | 8.64 | N/A |
| 207 | 206 | | FJ1427_P035MP03G02 | 0.684 | 0.049 | 46.9 | 7.54E−04 | 7.03 | N/A |
| 209 | 207 | | FJ1427 P035MP03A03 | 0.296 | 0.050 | 341.4 | 2.48E−04 | 12.27 | N/A |
| 210 | 208 | | FJ1427_P035MP03B03 | 0.310 | 0.048 | 261.48 | 4.99E−04 | 15.53 | 3.21E−01 |
| 212 | 209 | | FJ1427_P035MP03D03 | 0.265 | 0.048 | 90.37 | 5.38E−04 | 10.94 | N/A |
| 213 | 210 | | FJ1427_P035MP03E03 | 0.281 | 0.048 | 53.86 | 1.36E−03 | 16.76 | 3.46E−01 |
| 214 | 211 | | FJ1427_P035MP03F03 | 0.107 | 0.048 | 347.43 | 3.61E−04 | 18.35 | 3.07E−01 |
| 215 | 212 | | FJ1427_P035MP03G03 | 0.137 | 0.050 | 105.4 | 1.14E−03 | 10.69 | N/A |
| 217 | 213 | | FJ1427_P035MP03A04 | 0.305 | 0.051 | 318.54 | 3.73E−04 | 7.23 | N/A |
| 218 | 214 | | FJ1427 P035MP03B04 | 0.186 | 0.048 | 286.39 | 4.30E−04 | 9.54 | N/A |
| 219 | 215 | | FJ1427 P035MP03C04 | 0.395 | 0.048 | 141.52 | 3.07E−04 | 8.91 | N/A |
| 220 | 216 | | FJ1427 P035MP03D04 | 0.447 | 0.048 | 34.63 | 1.60E−03 | 9.03 | N/A |
| 221 | 217 | | FJ1427_P035MP03E04 | 0.220 | 0.048 | 346.71 | 2.53E−04 | 10.26 | N/A |
| 222 | 218 | | FJ1427_P035MP03F04 | 0.153 | 0.049 | 258.53 | 4.02E−04 | 8.16 | N/A |
| 224 | 219 | | FJ1427_P035MP03H04 | 0.262 | 0.050 | 96.55 | 4.31E−04 | 8.43 | N/A |
| 226 | 220 | | FJ1427_P035MP03B05 | 0.401 | 0.050 | 400.47 | 8.98E−04 | 12.18 | N/A |
| 229 | 221 | | FJ1427 P035MP03E05 | 0.230 | 0.049 | 90.97 | 5.26E−04 | 6.31 | N/A |
| 231 | 222 | | FJ1427_P035MP03G05 | 0.914 | 0.049 | 94.07 | 3.51E−04 | 5.31 | N/A |
| 232 | 223 | | FJ1427 P035MP03H05 | 0.316 | 0.049 | 31.63 | 7.72E−04 | 5.66 | N/A |
| 233 | 224 | | FJ1427 P035MP03A06 | 0.393 | 0.047 | 351.15 | 1.95E−04 | 4.74 | N/A |
| 235 | 225 | | FJ1427 P035MP03C06 | 1.208 | 0.057 | 421.82 | 6.58E−04 | 20.02 | 4.33E−01 |
| 237 | 226 | | FJ1427_P035MP03E06 | 0.299 | 0.048 | 99.96 | 1.16E−03 | 7.58 | N/A |
| 238 | 227 | | FJ1427_P035MP03F06 | 0.434 | 0.048 | 359.12 | 2.86E−04 | 4.66 | N/A |
| 241 | 228 | | FJ1427_P035MP03A07 | 0.307 | 0.049 | 150 | 2.81E−04 | 4.97 | N/A |
| 243 | 229 | | FJ1427_P035MP03C07 | 0.372 | 0.047 | 52.24 | 5.33E−04 | 4.01 | N/A |
| 244 | 230 | | FJ1427 P035MP03D07 | 0.209 | 0.049 | 372.01 | 2.63E−03 | 6.21 | N/A |
| 245 | 231 | | FJ1427 P035MP03E07 | 0.211 | 0.057 | 399.68 | 1.68E−03 | 11.86 | N/A |
| 246 | 232 | | FJ1427 P035MP03F07 | 0.156 | 0.048 | 69.86 | 1.26E−03 | 3 | N/A |
| 247 | 233 | | FJ1427_P035MP03G07 | 0.201 | 0.048 | 55.87 | 2.86E−03 | 6.36 | N/A |
| 248 | 234 | | FJ1427_P035MP03H07 | 0.649 | 0.053 | 374.89 | 1.72E−03 | 8.41 | N/A |
| 250 | 235 | | FJ1427 P035MP03B08 | 1.124 | 0.052 | 413.11 | 6.40E−04 | 19.7 | 4.75E−01 |
| 251 | 236 | | FJ1427 P035MP03C08 | 0.972 | 0.054 | 407.61 | 7.57E−04 | 9.86 | N/A |
| 253 | 237 | | FJ1427_P035MP03E08 | 1.112 | 0.048 | 165.75 | 1.49E−04 | 2.97 | N/A |
| 255 | 238 | | FJ1427_P035MP03G08 | 1.260 | 0.053 | 419.28 | 5.50E−04 | 23.88 | 4.72E−01 |
| 257 | 239 | | FJ1427_P035MP03A09 | 0.208 | 0.049 | 370.9 | 4.80E−04 | 3.69 | N/A |
| 258 | 240 | | FJ1427_P035MP03B09 | 0.467 | 0.046 | 401.99 | 2.02E−03 | 9.85 | N/A |
| 260 | 241 | | FJ1427 P035MP03D09 | 0.313 | 0.059 | 397.85 | 1.61E−03 | 18.79 | 5.40E−01 |
| 262 | 242 | | FJ1427 P035MP03F09 | 0.621 | 0.048 | 190.2 | 3.47E−04 | 4.39 | N/A |
| 263 | 243 | | FJ1427_P035MP03G09 | 0.843 | 0.054 | 404.02 | 7.13E−04 | 13.59 | N/A |
| 264 | 244 | | FJ1427_P035MP03H09 | 0.166 | 0.052 | 67.9 | 1.84E−03 | 6.07 | N/A |
| 265 | 245 | | FJ1427_P035MP03A10 | 0.983 | 0.071 | 413.1 | 6.36E−04 | 15.94 | 5.06E−01 |
| 266 | 246 | | FJ1427 P035MP03B10 | 0.286 | 0.050 | 377.33 | 7.07E−04 | 7.72 | N/A |
| 267 | 247 | | FJ1427 P035MP03C10 | 0.596 | 0.047 | 128.12 | 4.39E−04 | 2.47 | N/A |
| 268 | 248 | | FJ1427_P035MP03D10 | 0.118 | 0.047 | 33.15 | 1.20E−03 | 4.14 | N/A |
| 269 | 249 | | FJ1427_P035MP03E10 | 0.398 | 0.048 | 33.99 | 2.07E−03 | 8.56 | N/A |
| 271 | 250 | | FJ1427_P035MP03G10 | 0.260 | 0.048 | 40.5 | 1.65E−03 | 4.73 | N/A |
| 272 | 251 | | FJ1427 P035MP03H10 | 0.578 | 0.049 | 48 | 1.09E−03 | 5.22 | N/A |
| 274 | 252 | | FJ1427 P035MP03B11 | 0.987 | 0.052 | 410.36 | 6.22E−04 | 13.53 | N/A |
| 275 | 253 | | FJ1427 P035MP03C11 | 1.306 | 0.059 | 411.83 | 5.14E−04 | 19.27 | 4.94E−01 |
| 276 | 254 | | FJ1427 P035MP03D11 | 0.118 | 0.049 | 94.76 | 1.02E−03 | 3.73 | N/A |
| 277 | 255 | | FJ1427_P035MP03E11 | 0.624 | 0.050 | 389.61 | 1.48E−03 | 14.78 | N/A |
| 278 | 256 | | FJ1427 P035MP03F11 | 0.474 | 0.048 | 118.25 | 2.77E−04 | 4.2 | N/A |
| 279 | 257 | | FJ1427_P035MP03G11 | 0.380 | 0.057 | 391.93 | 1.22E−03 | 16.07 | 4.30E−01 |
| 282 | 258 | | FJ1427 P035MP03B12 | 0.202 | 0.049 | 375.75 | 1.25E−03 | 7.3 | N/A |
| 283 | 259 | | FJ1427 P035MP03C12 | 0.321 | 0.047 | 386.64 | 1.40E−03 | 3.41 | N/A |
| 481 | 260 | | FJ1427_P035MP06A01 | 0.348 | 0.047 | 474.12 | 5.61E−04 | 23.32 | 2.86E−01 |
| 482 | 261 | | FJ1427_P035MP06B01 | 0.521 | 0.046 | 476.12 | 2.10E−03 | 23.68 | 4.27E−01 |
| 483 | 262 | | FJ1427_P035MP06C01 | 1.342 | 0.047 | 472.96 | 5.44E−04 | 38.33 | 1.77E−01 |
| 484 | 263 | | FJ1427 P035MP06D01 | 1.101 | 0.064 | 480.76 | 3.10E−04 | 57.08 | 1.43E−01 |
| 487 | 264 | | FJ1427 P035MP06G01 | 0.557 | 0.049 | 381.48 | 1.43E−04 | 8.51 | N/A |
| 488 | 265 | | FJ1427_P035MP06H01 | 0.720 | 0.048 | 462.91 | 1.01E−03 | 19.52 | 2.78E−01 |
| 490 | 266 | | FJ1427_P035MP06B02 | 0.435 | 0.048 | 452.14 | 8.53E−04 | 13.8 | N/A |
| 491 | 267 | | FJ1427 P035MP06C02 | 0.799 | 0.048 | 463.95 | 4.55E−04 | 23.13 | 2.17E−01 |
| 493 | 268 | | FJ1427_P035MP06E02 | 0.148 | 0.047 | 452.54 | 1.49E−03 | 23.64 | 3.27E−01 |
| 494 | 269 | | FJ1427_P035MP06F02 | 0.278 | 0.047 | 448.3 | 3.70E−04 | 25.59 | 1.42E−01 |
| 495 | 270 | | FJ1427_P035MP06G02 | 0.677 | 0.047 | 467.81 | 6.19E−04 | 19.76 | 1.86E−01 |
| 496 | 271 | | FJ1427_P035MP06H02 | 0.371 | 0.050 | 452.86 | 1.71E−04 | 34.32 | 8.89E−02 |
| 497 | 272 | | FJ1427_P035MP06A03 | 0.148 | 0.047 | 428.04 | 8.82E−04 | 16.47 | 3.37E−01 |
| 500 | 273 | | FJ1427_P035MP06D03 | 1.020 | 0.047 | 471.16 | 2.90E−04 | 60.68 | 1.49E−01 |
| 501 | 274 | | FJ1427 P035MP06E03 | 0.570 | 0.048 | 462.36 | 7.45E−04 | 37.48 | 2.04E−01 |
| 503 | 275 | | FJ1427_P035MP06G03 | 0.267 | 0.048 | 458.78 | 5.86E−04 | 34.77 | 2.69E−01 |
| 504 | 276 | | FJ1427_P035MP06H03 | 0.239 | 0.050 | 455.35 | 1.96E−04 | 49.62 | 1.25E−01 |
| 506 | 277 | | FJ1427_P035MP06B04 | 0.935 | 0.048 | 465.64 | 1.88E−04 | 54.68 | 1.33E−01 |
| 507 | 278 | | FJ1427_P035MP06C04 | 0.187 | 0.046 | 446.33 | 8.40E−04 | 29.68 | 2.58E−01 |
| 508 | 279 | | FJ1427_P035MP06D04 | 0.189 | 0.047 | 452.08 | 6.21E−04 | 30.89 | 3.20E−01 |
| 509 | 280 | | FJ1427_P035MP06E04 | 0.974 | 0.053 | 466.26 | 1.98E−04 | 66.48 | 1.28E−01 |
| 510 | 281 | | FJ1427 P035MP06F04 | 1.328 | 0.049 | 469.61 | 4.87E−04 | 52.43 | 2.12E−01 |
| 511 | 282 | | FJ1427_P035MP06G04 | 0.213 | 0.047 | 447.95 | 6.41E−04 | 25.85 | 2.45E−01 |
| 512 | 283 | | FJ1427_P035MP06H04 | 1.025 | 0.048 | 454.77 | 2.45E−04 | 36.08 | 1.16E−01 |
| 513 | 284 | | FJ1427_P035MP06A05 | 0.149 | 0.046 | 439.59 | 1.18E−03 | 22.03 | 4.61E−01 |
| 514 | 285 | | FJ1427_P035MP06B05 | 0.617 | 0.047 | 457.12 | 8.71E−04 | 30.53 | 2.37E−01 |
| 515 | 286 | | FJ1427_P035MP06C05 | 0.580 | 0.046 | 439.77 | 7.51E−04 | 15.43 | 2.23E−01 |
| 516 | 287 | | FJ1427_P035MP06D05 | 0.304 | 0.053 | 454.57 | 4.83E−04 | 42.58 | 1.86E−01 |
| 520 | 288 | | FJ1427_P035MP06H05 | 0.590 | 0.048 | 418.52 | 8.85E−04 | 25.16 | 1.81E−01 |
| 521 | 289 | | FJ1427_P035MP06A06 | 0.300 | 0.046 | 431.32 | 6.31E−04 | 28.53 | 2.23E−01 |
| 522 | 290 | | FJ1427 P035MP06B06 | 1.418 | 0.046 | 440.19 | 3.24E−04 | 30.17 | 1.21E−01 |
| 523 | 291 | | FJ1427_P035MP06C06 | 0.255 | 0.048 | 436.72 | 6.98E−04 | 19.74 | 2.05E−01 |
| 524 | 292 | | FJ1427_P035MP06D06 | 0.289 | 0.047 | 426.31 | 2.90E−04 | 22.59 | 1.27E−01 |
| 525 | 293 | | FJ1427_P035MP06E06 | 1.453 | 0.047 | 443.23 | 2.41E−04 | 36.18 | 8.34E−02 |
| 526 | 294 | | FJ1427_P035MP06F06 | 0.224 | 0.048 | 427.72 | 9.35E−04 | 19.34 | 1.47E−01 |
| 530 | 295 | | FJ1427_P035MP06B07 | 1.015 | 0.046 | 447.21 | 2.85E−04 | 39.69 | 1.14E−01 |
| 532 | 296 | | FJ1427_P035MP06D07 | 0.957 | 0.049 | 449.94 | 3.46E−04 | 51.29 | 1.70E−01 |
| 537 | 297 | | FJ1427 P035MP06A08 | 0.440 | 0.047 | 413.69 | 4.97E−04 | 2.11 | N/A |
| 539 | 298 | | FJ1427_P035MP06C08 | 0.297 | 0.048 | 430.14 | 3.35E−04 | 33.41 | 1.48E−01 |
| 540 | 299 | | FJ1427 P035MP06D08 | 0.836 | 0.048 | 434.79 | 2.09E−04 | 38.84 | 1.22E−01 |
| 541 | 300 | | FJ1427_P035MP06E08 | 0.359 | 0.047 | 419.89 | 2.67E−04 | 25.86 | 1.28E−01 |
| 542 | 301 | | FJ1427_P035MP06F08 | 0.343 | 0.048 | 428 | 2.74E−04 | 45.72 | 1.31E−01 |
| 543 | 302 | | FJ1427_P035MP06G08 | 0.255 | 0.048 | 429.73 | 2.86E−04 | 42.71 | 1.31E−01 |
| 544 | 303 | | FJ1427_P035MP06H08 | 0.313 | 0.048 | 428.17 | 3.49E−04 | 37.37 | 1.18E−01 |
| 545 | 304 | | FJ1427_P035MP06A09 | 0.192 | 0.046 | 413.96 | 9.47E−04 | 19.81 | 1.98E−01 |
| 546 | 305 | | FJ1427_P035MP06B09 | 0.329 | 0.066 | 424.36 | 2.25E−03 | 89.43 | 1.64E−02 |
| 547 | 306 | | FJ1427 P035MP06C09 | 0.690 | 0.046 | 436.33 | 1.01E−03 | 29.27 | 2.45E−01 |
| 550 | 307 | | FJ1427_P035MP06F09 | 0.564 | 0.046 | 383.12 | 1.47E−04 | 8.59 | N/A |
| 551 | 308 | | FJ1427 P035MP06G09 | 0.202 | 0.049 | 419.96 | 7.26E−04 | 34.74 | 1.58E−01 |
| 554 | 309 | | FJ1427_P035MP06B10 | 0.264 | 0.058 | 418.07 | 2.23E−03 | 80.94 | 6.01E−02 |
| 555 | 310 | | FJ1427_P035MP06C10 | 0.358 | 0.050 | 422.9 | 2.08E−04 | 53.92 | 1.55E−01 |
| 559 | 311 | | FJ1427_P035MP06G10 | 1.004 | 0.047 | 432.87 | 2.61E−04 | 48.85 | 1.42E−01 |
| 573 | 312 | | FJ1427 P035MP06E12 | 0.271 | 0.047 | 403.99 | 4.96E−04 | 19.27 | 1.56E−01 |

| | doorlopende | | | | | | |
|---|---|---|---|---|---|---|---|
| | nummering | | | | | | |
| | Patent | | | | | | CDR3 |
| Clone | clone | | VH | | | | Family |
| nr. | ID | VH | ID | CDR1 | CDR2 | CDR3 | ID |
| 115 | 14 | EVQLVESGGGLVQTGGSLRLSCAASGSQFI | b51 | NDVMG- | DMDDTGSTEYADSVKG- | GLWIKGRHFDY- | 14 |
| | | NDVMGWYRQVPGKQRELVADMDDTGSTEYA | | SEQ ID | SEQ ID | SEQ ID | |
| | | DSVKGRFTILRDSVKNTAYLQMSNLKPEDT | | NO: 505 | NO: 506 | NO: 507 | |
| | | GVYYCKAGLWIKGRHFDYWGQGTQVTVSS- | | | | | |
| | | SEQ ID | | | | | |
| | | NO: 14 | | | | | |
| 141 | 15 | QVQLVESGGGSVQPGGSLRLSCAASGFTFS | b176 | NYAMS- | SITGFGRGTDYADSVKG- | YSSSTYYPPTPARGRDY- | 38 |
| | | NYAMSWVRQAPGKGLEWVASITGFGRGTDY | | SEQ ID | SEQ ID | SEQ ID | |
| | | ADSVKGRFTISRDNAEDTLYLQMNSLKPED | | NO: 508 | NO: 509 | NO: 510 | |
| | | TAVYYCAKYSSSTYYPPTPARGRDYRGQGT | | | | | |
| | | QVTVSS- | | | | | |
| | | SEQ ID | | | | | |
| | | NO: 15 | | | | | |
| 154 | 16 | EVQLVESGGGLVQAGGSLRLSCAASGRAIE | b19 | NYPVG- | AITWISGSTLYADSVKG- | ALKTITRGQNDYSY- | 1 |
| | | NYPVGWFRQAPGKEREFVAAITWISGSTLY | | SEQ ID | SEQ ID | SEQ ID | |
| | | ADSVKGRFTISRDNAKNTVYLQMSSLKPED | | NO: 511 | NO: 512 | NO: 513 | |
| | | TALYYCAAALKTITRGQNDYSYWGQGTQVT | | | | | |
| | | VSS- | | | | | |
| | | SEQ ID | | | | | |
| | | NO: 16 | | | | | |
| 163 | 17 | QVQLQESGGGLVQAGGSLRLSCVASGSVSS | b81 | INGMA- | AISRVGNTAYGDSVKG- | DSWGGDDY- | 12 |
| | | INGMAWYRQGADNQRVLVAAISRVGNTAYG | | SEQ ID | SEQ ID | SEQ ID | |
| | | DSVKGRFTISRQNARNTVYLQMNSLKPEDT | | NO: 514 | NO: 515 | NO: 516 | |
| | | AVYYCNADSWGGDDYWGQGTQVTVSS- | | | | | |
| | | SEQ ID | | | | | |
| | | NO: 17 | | | | | |
| 211 | 18 | QVQLVESGGGLVQPGGSLRLSCAISGGTLD | b160 | SYGIG- | CMSRSDDRTYYADSVKG- | VDAYGCSLVQPTTYDF- | 34 |
| | | SYGIGWVRQAPGKQREGVSCMSRSDDRTYY | | SEQ ID | SEQ ID | SEQ ID | |
| | | ADSVKGRFTISKDSAKNTVYLQMTSLKPED | | NO: 517 | NO: 518 | NO: 519 | |
| | | TAVYYCAAVDAYGCSLVQPTTYDFWGLGTQ | | | | | |
| | | VTVSS- | | | | | |
| | | SEQ ID | | | | | |
| | | NO: 18 | | | | | |
| 254 | 19 | EVQLVESGGGLVQTGGSLRLSCAASGGTFS | b50 | RDAMA- | LISWSGATTNYADSVKG- | DRRPMGSRSYFEPTEYDD- | 9 |
| | | RDAMAWFRQVPGKEREFVALISWSGATTNY | | SEQ ID | SEQ ID | SEQ ID | |
| | | ADSVKGRFAISRDNGKNTVYLQMNRLKPAD | | NO: 520 | NO: 521 | NO: 522 | |
| | | TAIYYCAADRRPMGSRSYFEPTEYDDWGQG | | | | | |
| | | TQVTVSS- | | | | | |
| | | SEQ ID | | | | | |
| | | NO: 19 | | | | | |
| 270 | 20 | EVQLVESGGGLVQAGGSLRLSCAASGRDFS | b20 | SYAMG- | AITWTKRSTDFPDSVKG- | ARGLPVTPLGDIIY- | 3 |
| | | SYAMGWFRQAPGKEREFWVAITWTKRSTDF | | SEQ ID | SEQ ID | SEQ ID | |
| | | PDSVKGRFTISRDNAKNTVYLDMNSLKPED | | NO: 523 | NO: 524 | NO: 525 | |
| | | TAVYYCASARGLPVTPLGDIIYWGEGTLVT | | | | | |
| | | VSS- | | | | | |
| | | SEQ ID | | | | | |
| | | NO: 20 | | | | | |
| 281 | 21 | EVQLVESGGGLVQAGGSLRLSCAASGRTFS | b23 | INAMG- | AISRSGGSTVYVDGVKG- | TMAVGWTTRWRTADFDS- | 32 |
| | | INAMGWFRQAPGKEREFVAAISRSGGSTVY | | SEQ ID | SEQ ID | SEQ ID | |
| | | VDGVKGRFTISRDNAKNTVYLQMNSLEPED | | NO: 526 | NO: 527 | NO: 528 | |
| | | TAVYYCAATMAVGWTTRWRTADFDSWGQGT | | | | | |
| | | QVTVSS- | | | | | |
| | | SEQ ID | | | | | |
| | | NO: 21 | | | | | |
| 286 | 22 | EVQLVESGGGLVQAGGSLRLSCAASGSIFS | b30 | INAMA- | AISRDGGASVYRDSVKG- | TRAIGWTARWITTDFDF- | 33 |
| | | INAMAWFRQVPGMERELVAAISRDGGASVY | | SEQ ID | SEQ ID | SEQ ID | |
| | | RDSVKGRFTISRDNSKNTVYLQMNTLKPED | | NO: 529 | NO: 530 | NO: 531 | |
| | | TAIYVCAATRAIGWTARWITTDFDFWGQGT | | | | | |
| | | QVTVSS- | | | | | |
| | | SEQ ID | | | | | |
| | | NO: 22 | | | | | |
| 502 | 23 | QVQLVESGGGLVQAGGSLRLSCAVSGDVFV | b132 | RYTMA- | SVTDSGRTTDYVHSVKG- | NTDYFQIKSLDANT- | 20 |
| | | RYTMAWFRQAPGKEREFVASVTDSGRTTDY | | SEQ ID | SEQ ID | SEQ ID | |
| | | VHSVKGRFTVSRDNAKNTVYLQMNNLKPED | | NO: 532 | NO: 533 | NO: 534 | |
| | | TAVYYCAANTDYFQIKSLDANTWGQGTQVT | | | | | |
| | | VSS- | | | | | |
| | | SEQ ID | | | | | |
| | | NO: 23 | | | | | |
| 517 | 24 | QVQLVESGGELVQGGASLRLSCAASGRTFS | b86 | NANMA- | LITWSSGSTLYADSVKG- | DGPPYSGTYYRYDTYDY- | 5 |
| | | NANMAWFRQAPEKEREFVALITWSSGSTLY | | SEQ ID | SEQ ID | SEQ ID | |
| | | ADSVKGRFTISRDNARKMVYLQMNSLKPED | | NO: 535 | NO: 536 | NO: 537 | |
| | | TAVYYCAADGPPYSGTYYRYDTYDYWGQGT | | | | | |
| | | QVTVSS- | | | | | |
| | | SEQ ID | | | | | |
| | | NO: 24 | | | | | |
| 518 | 25 | QVQLVESGGGLVQTGDSLRLSCAASGRSLD | b162 | TTYIA- | YISPRFSHTWYADSVKG- | REHSGSTAWEHYDH- | 24 |
| | | TTYIAWFRQAPGKERDFLAYISPRFSHTWY | | SEQ ID | SEQ ID | SEQ ID | |
| | | ADSVKGRFTISRNIAKRTVDLEMNSLEPED | | NO: 538 | NO: 539 | NO: 540 | |
| | | TAVYYCAAREHSGSTAWEHYDHWGQGTQVT | | | | | |
| | | VSS- | | | | | |
| | | SEQ ID | | | | | |
| | | NO: 25 | | | | | |
| 529 | 26 | QVQLQESGGGLVQAGGSLRLSCAASGDVFV | b76 | RYTMA- | SVTDSGRTTEYVDSVKG- | NTDYFQIRSLDLNT- | 20 |
| | | RYTMAWFRQAPGKEREFVASVTDSGRTTEY | | SEQ ID | SEQ ID | SEQ ID | |
| | | VDSVKGRFTVSRDNAKNTAYLQMNNLKPED | | NO: 541 | NO: 542 | NO: 543 | |
| | | TAIYYCAANTDYFQIRSLDLNTWGQGTQVT | | | | | |
| | | VSS- | | | | | |
| | | SEQ ID | | | | | |
| | | NO: 26 | | | | | |
| 97 | 111 | QVQLVESGGGLVQTGGSLRLSCVVSGSHFI | b170 | SDVMG- | DMADGGSAKYGDSVKG- | GLWITGRHSDY- | 14 |
| | | SDVMGWYRQVPGKQRELVADMADGGSAKYG | | SEQ ID | SEQ ID | SEQ ID | |
| | | DSVKGRFTILRDSVKNTVYLQMSSLNPEDT | | NO: 798 | NO: 799 | NO: 800 | |
| | | GVYYCKAGLWITGRHSDYWGQGTQVTVSS- | | | | | |
| | | SEQ ID | | | | | |
| | | NO: 111 | | | | | |
| 98 | 112 | QVQLVESGGGLVQTGGSLRLSCAASGSQFI | b164 | NDVMG- | DMDDTGSTKYADSVKG- | GLWIKGRHFDY- | 14 |
| | | NDVMGWYRQVPGKQRELVADMDDTGSTKYA | | SEQ ID | SEQ ID | SEQ ID | |
| | | DSVKGRFTILRDSVKNTAYLQMSNLKPEDT | | NO: 801 | NO: 802 | NO: 803 | |
| | | GVYYCKAGLWIKGRHFDYWGQGTQVTVSS- | | | | | |
| | | SEQ ID | | | | | |
| | | NO: 112 | | | | | |
| 99 | 113 | QVQLVESGGGLVQPGGSLGLSCAASGFTFD | b151 | NYAMS- | SITGAGRGTHYADSVKG- | YSSSTYYPPTPARGTDY- | 38 |
| | | NYAMSWVRQAPGKGLEWVSSITGAGRGTHY | | SEQ ID | SEQ ID | SEQ ID | |
| | | ADSVKGRFTISRDNAKNTLYLQMNSLKPED | | NO: 804 | NO: 805 | NO: 806 | |
| | | TAVYYCAKYSSSTYYPPTPARGTDYRGPGT | | | | | |
| | | QVTVSS- | | | | | |
| | | SEQ ID | | | | | |
| | | NO: 113 | | | | | |
| 100 | 114 | QVQLQESGGGLVQTGGSLRLSCAASGSQFI | b84 | NDVMG- | DMDDTGSTKYADSVKG- | GLWIKGRHSDY- | 14 |
| | | NDVMGWYRQVPGKQRELVADMDDTGSTKYA | | SEQ ID | SEQ ID | SEQ ID | |
| | | DSVKGRFTILRDSVKNTAYLQMSNLKPEDT | | NO: 807 | NO: 808 | NO: 809 | |
| | | GVYYCKAGLWIKGRHSDYWGQGTQVTVSS- | | | | | |
| | | SEQ ID | | | | | |
| | | NO: 114 | | | | | |
| 101 | 115 | EVQLVESGGGLVQIGGSLRLSCAASGRTFS | b46 | SITMA- | GINFSGTRTFYADSVKG- | SPRGFYGPGNALYDY- | 29 |
| | | SITMAYFRQVPGKEREWVAGINFSGTRTFY | | SEQ ID | SEQ ID | SEQ ID | |
| | | ADSVKGRFLISRDDAKSTMYLQMNSLKPED | | NO: 810 | NO: 811 | NO: 812 | |
| | | TAVYYCAASPRGFYGPGNALYDYWGQGTQV | | | | | |
| | | TVSS- | | | | | |
| | | SEQ ID | | | | | |
| | | NO: 115 | | | | | |
| 102 | 116 | EVQLVESGGGLVQTGGSLRLSCAVSGSRFI | b57 | SDVMG- | DMADGGSAKYADSVKG- | GLWIAGRHSDY- | 14 |
| | | SDVMGWYRQVPGKQRELVADMADGGSAKYA | | SEQ ID | SEQ ID | SEQ ID | |
| | | DSVKGRFSILRDSVKNTVYLQMSSLKPEDT | | NO: 813 | NO: 814 | NO: 815 | |
| | | GIYYCKAGLWIAGRHSDYWGQGTQVTVSS- | | | | | |
| | | SEQ ID | | | | | |
| | | NO: 116 | | | | | |
| 103 | 117 | QVQLVESGGGLVQTGGSLRLSCAVSGSRFI | b168 | SDVMG- | DMADGGSAKYADSVKG- | GLWIAGRHSDY- | 14 |
| | | SDVMGWYRQVPGKQRELVADMADGGSAKYA | | SEQ ID | SEQ ID | SEQ ID | |
| | | DSVKGRFSILRDSAKNTVYLQMSSLKPEDT | | NO: 816 | NO: 817 | NO: 818 | |
| | | GIYYCKAGLWIAGRHSDYWGQGTQVTVSS- | | | | | |
| | | SEQ ID | | | | | |
| | | NO: 117 | | | | | |
| 104 | 118 | QVQLVESGGGLVQPGGSLGLSCAASGFTFD | b151 | NYAMS- | SITGAGRGTHYADSVKG- | YSSSTYYPPTPARGTDY- | 38 |
| | | NYAMSWVRQAPGKGLEWVSSITGAGRGTHY | | SEQ ID | SEQ ID | SEQ ID | |
| | | ADSVKGRFTISRDNAKNTLYLQMNSLKPED | | NO: 819 | NO: 820 | NO: 821 | |
| | | TAVYYCAKYSSSTYYPPTPARGTDYRGPGT | | | | | |
| | | QVTVSS- | | | | | |
| | | SEQ ID | | | | | |
| | | NO: 118 | | | | | |
| 105 | 119 | QVQLVESGGGLVQPGGSLRLSCAASGFTFD | b154 | NYAMT- | SITGAGRGTHYADSVKG- | YSSSTYYPTTPVRGTDY- | 38 |
| | | NYAMTWVRQAPGKGLEWVSSITGAGRGTHY | | SEQ ID | SEQ ID | SEQ ID | |
| | | ADSVKGRFTISRDNAKNTLYLQVNSLKPED | | NO: 822 | NO: 823 | NO: 824 | |
| | | TAVYYCARYSSSTYYPTTPVRGTDYRGQGT | | | | | |
| | | QVTVSS- | | | | | |
| | | SEQ ID | | | | | |
| | | NO: 119 | | | | | |
| 106 | 120 | EVQLVESGGTLVQTGGSLRLSCVVSGSHFI | b64 | SDVMG- | DMADGGSAKYGDSVKG- | GLWIKGRHSDY- | 14 |
| | | SDVMGWYRQVPGKQRELVADMADGGSAKYG | | SEQ ID | SEQ ID | SEQ ID | |
| | | DSVKGRFTIVRDSVKNTVYLQMSSLNPEDT | | NO: 825 | NO: 826 | NO: 827 | |
| | | GVYYCKAGLWIKGRHSDYWGQGTQVTVTS- | | | | | |
| | | SEQ ID | | | | | |
| | | NO: 120 | | | | | |
| 107 | 121 | QVQLVESGGGLVQPGGSLRLSCAASGSRFV | b159 | SDFMG- | DMADGGSARYGDSVKG- | GLWIAGRHFDY- | 14 |
| | | SDFMGWYRQVPGKQRELVADMADGGSARYG | | SEQ ID | SEQ ID | SEQ ID | |
| | | DSVKGRFTILRDNMNSTAFLQMSSLKPEDT | | NO: 828 | NO: 829 | NO: 830 | |
| | | GVYYCKAGLWIAGRHFDYWGQGTQVTVSS- | | | | | |
| | | SEQ ID | | | | | |
| | | NO: 121 | | | | | |
| 108 | 122 | QVQLVESGGGLVQVGGSLSVSCAASGRSFD | b175 | SITMA- | GINFSGSRTAYGDSVKG- | SPRGFYGPGHALYDY- | 29 |
| | | SITMAYFRQAPGNEREFIAGINFSGSRTAY | | SEQ ID | SEQ ID | SEQ ID | |
| | | GDSVKGRFTISRDNAKNTVFLQMNSLNPED | | NO: 831 | NO: 832 | NO: 833 | |
| | | TAVYYCAASPRGFYGPGHALYDYWGQGTQV | | | | | |
| | | TVSS- | | | | | |
| | | SEQ ID | | | | | |
| | | NO: 122 | | | | | |
| 109 | 123 | EVQLVESGGGLVQTGGSLRLSCAASGSQFI | b53 | NDVMG- | DMDDTGSTKYADSVKG- | GLWIKGRHSDY- | 14 |
| | | NDVMGWYRQVPGKQRELVADMDDTGSTKYA | | SEQ ID | SEQ ID | SEQ ID | |
| | | DSVKGRFTILRDSVKNTAYLQMSNLKPEDT | | NO: 834 | NO: 835 | NO: 836 | |
| | | GVYYCKAGLWIKGRHSDYWGQGTQVTVSS- | | | | | |
| | | SEQ ID | | | | | |
| | | NO: 123 | | | | | |
| 110 | 124 | EVQLVESGGGLVQAGGSLRLACALSGDVFV | b8 | RYTMA- | SVTDSGRTTDYVASVQG- | NTDYFQIRSLDRNT- | 20 |
| | | RYTMAWFRQAPGKEREFVASVTDSGRTTDY | | SEQ ID | SEQ ID | SEQ ID | |
| | | VASVQGRFTVSRDNNKNTVYLQMNSLKPED | | NO: 837 | NO: 838 | NO: 839 | |
| | | TAVYYCAANTDYFQIRSLDRNTWGQGTQVT | | | | | |
| | | VSS- | | | | | |
| | | SEQ ID | | | | | |
| | | NO: 124 | | | | | |
| 111 | 125 | QVQLVESGGGLVQPGGSLRLSCAASGSHFI | b158 | SDVMG- | DMADGGSVKYGDSVKG- | GLWITGRHFDY- | 14 |
| | | SDVMGWYRQVPGKQRELVADMADGGSVKYG | | SEQ ID | SEQ ID | SEQ ID | |
| | | DSVKGRFTILRDSVKNTVTLQMSSLNPEDT | | NO: 840 | NO: 841 | NO: 842 | |
| | | GVYYCKAGLWITGRHFDYWGQGIQVTVTS- | | | | | |
| | | SEQ ID | | | | | |
| | | NO: 125 | | | | | |
| 113 | 126 | QVQLVESGGGLVQPGGSLRLSCAASGFTFS | b157 | NYAMS- | SITGAGRGTYYAESVKG- | YDSSTFYPPTPARGIAD- | 36 |
| | | NYAMSWVRQAPGKGLEWVSSITGAGRGTYY | | SEQ ID | SEQ ID | SEQ ID | |
| | | AESVKGRFTISRDNDKNTLYLQMNSLKPED | | NO: 843 | NO: 844 | NO: 845 | |
| | | TAVYYCAKYDSSTFYPPTPARGIADRGQGT | | | | | |
| | | RVTVSS- | | | | | |
| | | SEQ ID | | | | | |
| | | NO: 126 | | | | | |
| 114 | 127 | QVQLVESGGGLVQTGGSLRLSCAASGSRFV | b166 | SDFMG- | DMADGGSARYGDSVKG- | GLWIAGRHFDY- | 14 |
| | | SDFMGWYRQVPGKQRELVADMADGGSARYG | | SEQ ID | SEQ ID | SEQ ID | |
| | | DSVKGRFTILRDSGNSTAYLQMSSLKPEDT | | NO: 846 | NO: 847 | NO: 848 | |
| | | GVYYCKAGLWIAGRHFDYWGQGTQVTVSS- | | | | | |
| | | SEQ ID | | | | | |
| | | NO: 127 | | | | | |
| 116 | 128 | QVQLVESGGGLVQAGGPLRLSCAASGGTFS | b91 | SYAMG- | ATTRGGGRTMYAVSTEG- | MTSYYSGTYYPDSSDFDI- | 18 |
| | | SYAMGWFRQAPGKEREFVAATTRGGGRTMY | | SEQ ID | SEQ ID | SEQ ID | |
| | | AVSTEGRFTCSRDNAKNTVYLLMNSLKPED | | NO: 849 | NO: 850 | NO: 851 | |
| | | TAVYYCAAMTSYYSGTYYPDSSDFDIWGQG | | | | | |
| | | TQVTVSS- | | | | | |
| | | SEQ ID | | | | | |
| | | NO: 128 | | | | | |
| 117 | 129 | EVQLVESGGGSVQTGGSLRLSCVVSGSHFI | b62 | SDVMG- | DMADGGSVKYGDSVKG- | GLWITGRHFDY- | 14 |
| | | SDVMGWYRQVPGKQRELVADMADGGSVKYG | | SEQ ID | SEQ ID | SEQ ID | |
| | | DSVKGRFTILRDSVKNTVTLQMSSLNPEDT | | NO: 852 | NO: 853 | NO: 854 | |
| | | GVYYCKAGLWITGRHFDYWGQGTQVTVTS- | | | | | |
| | | SEQ ID | | | | | |
| | | NO: 129 | | | | | |
| 118 | 130 | EVQLVESGGGLVQAGGSLRLSCAASGGTFS | b17 | SYAMG- | ATTRGGGRTMYAVSTEG- | MTSYYSGTYYPDSSDFDI- | 18 |
| | | SYAMGWFRQAPGKEREFVAATTRGGGRTMY | | SEQ ID | SEQ ID | SEQ ID | |
| | | AVSTEGRFTCSRDNAKNTVYLLMNSLKPED | | NO: 855 | NO: 856 | NO: 857 | |
| | | TAVYYCAAMTSYYSGTYYPDSSDFDIWGQG | | | | | |
| | | TQVTVSS- | | | | | |
| | | SEQ ID | | | | | |
| | | NO: 130 | | | | | |
| 119 | 131 | QVQLVESGGGLVQPGGSLGLSCAASGFTFS | b152 | NYAMS- | SITGFGRGTDYADSVKG- | YSSSTYYPPTPARGRDY- | 38 |
| | | NYAMSWVRQAPGKGLEWVASITGFGRGTDY | | SEQ ID | SEQ ID | SEQ ID | |
| | | ADSVKGRFTVSRDNAKNTLYLQMNSLKPED | | NO: 858 | NO: 859 | NO: 860 | |
| | | TAVYYCAKYSSSTYYPPTPARGRDYRGQGT | | | | | |
| | | QVTVSS- | | | | | |
| | | SEQ ID | | | | | |
| | | NO: 131 | | | | | |
| 121 | 132 | EVQLVESGGGLVQTGGSLRLSCTASGSQFI | b58 | NDVMG- | DMDDTGSTKYADSVNG- | GLWIKGRHSDY- | 14 |
| | | NDVMGWYRQVPGKQRELVADMDDTGSTKYA | | SEQ ID | SEQ ID | SEQ ID | |
| | | DSVNGRFTILRDSVKNTAYLQMSNLKPEDT | | NO: 861 | NO: 862 | NO: 863 | |
| | | GVYYCKAGLWIKGRHSDYWGQGTQVTVSS- | | | | | |
| | | SEQ ID | | | | | |
| | | NO: 132 | | | | | |
| 122 | 133 | EVQLVESGGGLVQAGGSLGLSCAASGGTFS | b7 | SYAMG- | ATTRGGGRTMYAVSTEG- | MTSYYSGTYYPDSSDFDI- | 18 |
| | | SYAMGWFRQAPGKEREFVAATTRGGGRTMY | | SEQ ID | SEQ ID | SEQ ID | |
| | | AVSTEGRFTCSRDNAKNTVYLQMNSLKPKD | | NO: 864 | NO: 865 | NO: 866 | |
| | | TAIYYCAAMTSYYSGTYYPDSSDFDIWGQG | | | | | |
| | | TQVTVSS- | | | | | |
| | | SEQ ID | | | | | |
| | | NO: 133 | | | | | |
| 123 | 134 | QVQLVESGGGLVQPGGSLELSCAASGFTFS | b150 | NYAMS- | SITGFGRGTDYADSVKG- | YSSSTYYPPTPARGRDY- | 38 |
| | | NYAMSWVRQAPGKGLEWVSSITGFGRGTDY | | SEQ ID | SEQ ID | SEQ ID | |
| | | ADSVKGRFTISRDNDKNTLYLQMNSLKPED | | NO: 867 | NO: 868 | NO: 869 | |
| | | TAVYYCARYSSSTYYPPTPARGRDYRGQGT | | | | | |
| | | QVTVSS- | | | | | |
| | | SEQ ID | | | | | |
| | | NO: 134 | | | | | |
| 124 | 135 | QVQLVESGGGLVQTGGSLRLSCAVSGSRFI | b169 | SDVMG- | DMADGGSAKYADSVKG- | GLWIAGRHSDY- | 14 |
| | | SDVMGWYRQVPGKQRELVADMADGGSAKYA | | SEQ ID | SEQ ID | SEQ ID | |
| | | DSVKGRFSILRDSVKNTVYLQMSSLKPEDT | | NO: 870 | NO: 871 | NO: 872 | |
| | | GIYYCKAGLWIAGRHSDYWGQGTQVTVSS- | | | | | |
| | | SEQ ID | | | | | |
| | | NO: 135 | | | | | |
| 125 | 136 | EVQLVESGGGLVQAGGSLRLSCAASGGTFS | b18 | SYAMG- | ATTRGGGRTMYAVSTEG- | MTSYYSGTYYPDSSDFDI- | 18 |
| | | SYAMGWFRQAPGKEREFVAATTRGGGRTMY | | SEQ ID | SEQ ID | SEQ ID | |
| | | AVSTEGRFTCSRDNAKNTVYLQMNSLKPKD | | NO: 873 | NO: 874 | NO: 875 | |
| | | TAIYYCAAMTSYYSGTYYPDSSDFDIWGQG | | | | | |
| | | TQVTVSS- | | | | | |
| | | SEQ ID | | | | | |
| | | NO: 136 | | | | | |
| 126 | 137 | EVQLVESGGGLVQTGGSLRLSCAASGSQFI | b52 | NDVMG- | DMDDTGSTKYADSVKG- | GLWIKGRHFDY- | 14 |
| | | NDVMGWYRQVPGKQRELVADMDDTGSTKYA | | SEQ ID | SEQ ID | SEQ ID | |
| | | DSVKGRFTILRDSVKNTAYLQMSNLKPEDT | | NO: 876 | NO: 877 | NO: 878 | |
| | | GVYYCKAGLWIKGRHFDYWGQGTQVTVSS- | | | | | |
| | | SEQ ID | | | | | |
| | | NO: 137 | | | | | |
| 127 | 138 | QVQLVESGGGLVQAGGSLRLSCAASGSQFI | b130 | NDVMG- | DMDDTGSTKYADSVKG- | GLWIKGRHFDY- | 14 |
| | | NDVMGWYRQVPGKQRELVADMDDTGSTKYA | | SEQ ID | SEQ ID | SEQ ID | |
| | | DSVKGRFTILRDSVKNTAYLQMSNLKPEDT | | NO: 879 | NO: 880 | NO: 881 | |
| | | GVYYCKAGLWIKGRHFDYWGQGTQVTVSS- | | | | | |
| | | SEQ ID | | | | | |
| | | NO: 138 | | | | | |
| 128 | 139 | QVQLVESGGGLVQAGDSLRLSCATSGLTFS | b90 | SYALG- | ATTRGGGRTMYAVSTEG- | MTSYYSGTYYPDSSDFDI- | 18 |
| | | SYALGWFRQAPGKKREFVAATTRGGGRTMY | | SEQ ID | SEQ ID | SEQ ID | |
| | | AVSTEGRFTCSRDNDKNTVYLLMNSLKPKD | | NO: 882 | NO: 883 | NO: 884 | |
| | | TAVYYCAAMTSYYSGTYYPDSSDFDIWGQG | | | | | |
| | | TQVTVSS- | | | | | |
| | | SEQ ID | | | | | |
| | | NO: 139 | | | | | |
| 129 | 140 | EVQLVESGGGLVQTGGSLRLSCAASGSQFI | b53 | NDVMG- | DMDDTGSTKYADSVKG- | GLWIKGRHSDY- | 14 |
| | | NDVMGWYRQVPGKQRELVADMDDTGSTKYA | | SEQ ID | SEQ ID | SEQ ID | |
| | | DSVKGRFTILRDSVKNTAYLQMSNLKPEDT | | NO: 885 | NO: 886 | NO: 887 | |
| | | GVYYCKAGLWIKGRHSDYWGQGTQVTVSS- | | | | | |
| | | SEQ ID | | | | | |
| | | NO: 140 | | | | | |
| 130 | 141 | EVQLVESGGGLVQTGGSLRLSCAASGSQFI | b52 | NDVMG- | DMDDTGSTKYADSVKG- | GLWIKGRHFDY- | 14 |
| | | NDVMGWYRQVPGKQRELVADMDDTGSTKYA | | SEQ ID | SEQ ID | SEQ ID | |
| | | DSVKGRFTILRDSVKNTAYLQMSNLKPEDT | | NO: 888 | NO: 889 | NO: 890 | |
| | | GVYYCKAGLWIKGRHFDYWGQGTQVTVSS- | | | | | |
| | | SEQ ID | | | | | |
| | | NO: 141 | | | | | |
| 131 | 142 | QVQLVESGGGLVQTGGSLRLSCAVSGSRFI | b169 | SDVMG- | DMADGGSAKYADSVKG- | GLWIAGRHSDY- | 14 |
| | | SDVMGWYRQVPGKQRELVADMADGGSAKYA | | SEQ ID | SEQ ID | SEQ ID | |
| | | DSVKGRFSILRDSVKNTVYLQMSSLKPEDT | | NO: 891 | NO: 892 | NO: 893 | |
| | | GIYYCKAGLWIAGRHSDYWGQGTQVTVSS- | | | | | |
| | | SEQ ID | | | | | |
| | | NO: 142 | | | | | |
| 132 | 143 | QVQLVESGGGLVQPGESLGLSCAASGFTFS | b149 | NYAMS- | SITGAGRGTDYADSVKG- | YSSGTYYPPTPVRGTDY- | 38 |
| | | NYAMSWVRQAPGKGLEWVSSITGAGRGTDY | | SEQ ID | SEQ ID | SEQ ID | |
| | | ADSVKGRFTISRDNAKNTLYLQMNSLKPED | | NO: 894 | NO: 895 | NO: 896 | |
| | | TAVYYCAKYSSGTYYPPTPVRGTDYRGQGT | | | | | |
| | | QVTVSS- | | | | | |
| | | SEQ ID | | | | | |
| | | NO: 143 | | | | | |
| 133 | 144 | EVQLVESGGGLVQIGGSLRLSCAASGRTFS | b45 | SITMA- | NFSGTRTFYADSVKG- | SPRGFYGPGNALYDY- | 29 |
| | | SITMAYFRQVPGKEHEWVAGINFSGTRTFY | | SEQ ID | SEQ ID | SEQ ID | |
| | | ADSVKGRFLISRDDAKSTMYLQMNSLKPED | | NO: 897 | NO: 898 | NO: 899 | |
| | | TAVYYCAASPRGFYGPGNALYDYWGQGTQV | | | | | |
| | | TVSS- | | | | | |
| | | SEQ ID | | | | | |
| | | NO: 144 | | | | | |
| 134 | 145 | EVQLVESGGGLVQTGGSLRLSCAVSGSRFI | b57 | SDVMG- | DMADGGSAKYADSVKG- | GLWIAGRHSDY- | 14 |
| | | SDVMGWYRQVPGKQRELVADMADGGSAKYA | | SEQ ID | SEQ ID | SEQ ID | |
| | | DSVKGRFSILRDSVKNTVYLQMSSLKPEDT | | NO: 900 | NO: 901 | NO: 902 | |
| | | GIYYCKAGLWIAGRHSDYWGQGTQVTVSS- | | | | | |
| | | SEQ ID | | | | | |
| | | NO: 145 | | | | | |
| 135 | 146 | EVQLVESGGGLVQTGGSLRLSCAASGSQFI | b54 | NDVTG- | DMDDTGSTKYADSVKG- | GLWIKGRHSDY- | 14 |
| | | NDVTGWYRQVPGKQRELVADMDDTGSTKYA | | SEQ ID | SEQ ID | SEQ ID | |
| | | DSVKGRFTILRDSVKNTAYLQMSNLKPEDT | | NO: 903 | NO: 904 | NO: 905 | |
| | | GVYYCKAGLWIKGRHSDYWGQGTQVTVSS- | | | | | |
| | | SEQ ID | | | | | |
| | | NO: 146 | | | | | |
| 136 | 147 | EVQLVESGGGSVQTGGSLRLSCVVSGSHFI | b61 | SDVMG- | DMADGGSAKYGDSVKG- | GLWITGRHSDY- | 14 |
| | | SDVMGWYRQVPGKQRELVADMADGGSAKYG | | SEQ ID | SEQ ID | SEQ ID | |
| | | DSVKGRFTILRDSVKNTVTLQMSSLNPEDT | | NO: 906 | NO: 907 | NO: 908 | |
| | | GVYYCKAGLWITGRHSDYWGQGTQVTVTS- | | | | | |
| | | SEQ ID | | | | | |
| | | NO: 147 | | | | | |
| 137 | 148 | QVQLQESGGGLVQAGGSLRLSCAASGGTFS | b78 | SYAMG- | ATTRGGGRTMYAVSTEG- | MTSYYSGTYYPDSSDFDI- | 18 |
| | | SYAMGWFRQAPGKEREFVAATTRGGGRTMY | | SEQ ID | SEQ ID | SEQ ID | |
| | | AVSTEGRFTCSRDNDKNTVYLLMNSLKPKD | | NO: 909 | NO: 910 | NO: 911 | |
| | | TAVYYCAAMTSYYSGTYYPDSSDFDIWGQG | | | | | |
| | | TQVTVSS- | | | | | |
| | | SEQ ID | | | | | |
| | | NO: 148 | | | | | |
| 138 | 149 | QVQLVESGGGLVQPGESLGLSCAASGFTFS | b149 | NYAMS- | SITGAGRGTDYADSVKG- | YSSGTYYPPTPVRGTDY- | 38 |
| | | NYAMSWVRQAPGKGLEWVSSITGAGRGTDY | | SEQ ID | SEQ ID | SEQ ID | |
| | | ADSVKGRFTISRDNAKNTLYLQMNSLKPED | | NO: 912 | NO: 913 | NO: 914 | |
| | | TAVYYCAKYSSGTYYPPTPVRGTDYRGQGT | | | | | |
| | | QVTVSS- | | | | | |
| | | SEQ ID | | | | | |
| | | NO: 149 | | | | | |
| 139 | 150 | QLQLVESGGGLVQPGGSLELSCAASGFTFS | b68 | NYAMS- | SITGFGRGTDYADSVKG- | YSSSTYYPPTPARGRDY- | 38 |
| | | NYAMSWVRQAPGKGLEWVSSITGFGRGTDY | | SEQ ID | SEQ ID | SEQ ID | |
| | | ADSVKGRFTISRDNAKNTLYLQMNSLKPED | | NO: 915 | NO: 916 | NO: 917 | |
| | | TAVYYCARYSSSTYYPPTPARGRDYRGQGT | | | | | |
| | | QVTVSS- | | | | | |
| | | SEQ ID | | | | | |
| | | NO: 150 | | | | | |
| 140 | 151 | EVQLVESGGGLVQTGGSLRLSCAASGSQFI | b53 | NDVMG- | DMDDTGSTKYADSVKG- | GLWIKGRHSDY- | 14 |
| | | NDVMGWYRQVPGKQRELVADMDDTGSTKYA | | SEQ ID | SEQ ID | SEQ ID | |
| | | DSVKGRFTILRDSVKNTAYLQMSNLKPEDT | | NO: 918 | NO: 919 | NO: 920 | |
| | | GVYYCKAGLWIKGRHSDYWGQGTQVTVSS- | | | | | |
| | | SEQ ID | | | | | |
| | | NO: 151 | | | | | |
| 142 | 152 | EVQLVESGGGLVQTGGSLRLSCAASGSRFI | b55 | SDFMG- | DMADGGSARYGDSVKG- | GLWIAGRHFDY- | 14 |
| | | SDFMGWYRQVPGKQRELVADMADGGSARYG | | SEQ ID | SEQ ID | SEQ ID | |
| | | DSVKGRFTILRESGNATAYLQMSSLKPEDT | | NO: 921 | NO: 922 | NO: 923 | |
| | | GVYYCKAGLWIAGRHFDYWGQGTQVTVSS- | | | | | |
| | | SEQ ID | | | | | |
| | | NO: 152 | | | | | |
| 145 | 153 | QVQLVESGGGLVQAGGSLRLSCAVSGDVFV | b137 | RYTMA- | TVTDSGRTTEYVDSVKG- | NTDYFRIRSLDANT- | 20 |
| | | RYTMAWFRQAPGKEREFVATVTDSGRTTEY | | SEQ ID | SEQ ID | SEQ ID | |
| | | VDSVKGRFTVSRDNAKNTVYLQMNNLKPED | | NO: 924 | NO: 925 | NO: 926 | |
| | | TAVYYCAANTDYFRIRSLDANTWGQGTQVT | | | | | |
| | | VSS- | | | | | |
| | | SEQ ID | | | | | |
| | | NO: 153 | | | | | |
| 146 | 154 | EVQLVESGGGLVEAGGSLRLSCAASGRAFN | b1 | NFPMG- | AITWISGSTLYADSVKG- | ALKTITRGQHDYTY- | 1 |
| | | NFPMGWFRQAPGKEREFVAAITWISGSTLY | | SEQ ID | SEQ ID | SEQ ID | |
| | | ADSVKGRFTISRDKSKNTVYLQMSGLKPED | | NO: 927 | NO: 928 | NO: 929 | |
| | | TALYYCAAALKTITRGQHDYTYWGQGTQVT | | | | | |
| | | VSS- | | | | | |
| | | SEQ ID | | | | | |
| | | NO: 154 | | | | | |
| 147 | 155 | QVQLVESGGGLVQAGGSLRLSCAASGRTFS | b120 | INTMG- | AISRSGDSTVYVDSVKG- | TVAVGWTTRWSTIDFDS- | 30 |
| | | INTMGWFRQAPGKEREFVAAISRSGDSTVY | | SEQ ID | SEQ ID | SEQ ID | |
| | | VDSVKGRFTISRDNAKNTVYLQMNTLKPED | | NO: 930 | NO: 931 | NO: 932 | |
| | | TAVYYCATTVAVGWTTRWSTIDFDSWGQGT | | | | | |
| | | QVTVSS- | | | | | |
| | | SEQ ID | | | | | |
| | | NO: 155 | | | | | |
| 148 | 156 | EVQLVESGGGLVQAGGSLRLSCAASGRSLS | b21 | TTEMG- | AITWSGRGTMYAESVE- | ARRGRAAVRSEGGYDF- | 4 |
| | | TTEMGWFRQAPGKEREFVAAITWSGRGTMY | | SEQ ID | SEQ ID | SEQ ID | |
| | | AESVEGRFAVSRENAKNTVYLQMNSLKPED | | NO: 933 | NO: 934 | NO: 935 | |
| | | TAIYYCAAARRGRAAVRSEGGYDFWGQGTQ | | | | | |
| | | VTVSS- | | | | | |
| | | SEQ ID | | | | | |
| | | NO: 156 | | | | | |
| 149 | 157 | QVQLVESGGGLVQAGGSLGLACALSGDVFV | b93 | RYTMA- | SVTDSGRTTDYVASVQG- | NTDYFQIRSLDRNT- | 20 |
| | | RYTMAWFRQAPGKEREFVASVTDSGRTTDY | | SEQ ID | SEQ ID | SEQ ID | |
| | | VASVQGRFTVSRDNNKNTVYLQMNSLKPED | | NO: 936 | NO: 937 | NO: 938 | |
| | | TAVYYCAANTDYFQIRSLDRNTWGQGTQVT | | | | | |
| | | VSS- | | | | | |
| | | SEQ ID | | | | | |
| | | NO: 157 | | | | | |
| 150 | 158 | QVQLVESGGGLVQAGGSLRLSCAASGDVFV | b101 | RYTMA- | SVTDSGRTTDYVDSVKG- | NTDYFQIRSLDANT- | 20 |
| | | RYTMAWFRQAPGKEREFVASVTDSGRTTDY | | SEQ ID | SEQ ID | SEQ ID | |
| | | VDSVKGRFTVSRDNAKNTVYLQMNNLKPED | | NO: 939 | NO: 940 | NO: 941 | |
| | | TARYYCAANTDYFQIRSLDANTWGQGTQVT | | | | | |
| | | VSS- | | | | | |
| | | SEQ ID | | | | | |
| | | NO: 158 | | | | | |
| 151 | 159 | QVQLVESGGGLVQAGGSLRLSCAVSGDVFV | b135 | RYTMA- | SVTDSGRTTEYVDSVKG- | NTDYFQIRSLDLNT- | 20 |
| | | RYTMAWFRQAPGKEREFVASVTDSGRTTEY | | SEQ ID | SEQ ID | SEQ ID | |
| | | VDSVKGRFTVSRDNAKNTAYLQMNNLKPED | | NO: 942 | NO: 943 | NO: 944 | |
| | | TAVYYCAANTDYFQIRSLDLNTWGQGTQVT | | | | | |
| | | VSS- | | | | | |
| | | SEQ ID | | | | | |
| | | NO: 159 | | | | | |
| 153 | 160 | EVQLVESGGGLVQAGGSLRLSCTVSGDVFV | b36 | RYTMA- | TVTDSGRTTEYVDSVKG- | NTDYFRIRSLDANT- | 20 |
| | | RYTMAWFRQAPGKEREFVATVTDSGRTTEY | | SEQ ID | SEQ ID | SEQ ID | |
| | | VDSVKGRFTVSRDNAKNTVYLQMNNLKPED | | NO: 945 | NO: 946 | NO: 947 | |
| | | TAVYYCAANTDYFRIRSLDANTWGQGTQVT | | | | | |
| | | VSS- | | | | | |
| | | SEQ ID | | | | | |
| | | NO: 160 | | | | | |
| 155 | 161 | EVQLVESGGGLVQAGGSLRLSCAASGSTFS | b31 | RQPMY- | AITWSGRGTLYADSVEG- | GPYGDAAYRHGRIDS- | 15 |
| | | RQPMYWFRQAPGKEREFVAAITWSGRGTLY | | SEQ ID | SEQ ID | SEQ ID | |
| | | ADSVEGRFTISRDNAKNTVYLQMNSLRPDD | | NO: 948 | NO: 949 | NO: 950 | |
| | | TAAYYCAAGPYGDAAYRHGRIDSWGQGTQV | | | | | |
| | | TVSS- | | | | | |
| | | SEQ ID | | | | | |
| | | NO: 161 | | | | | |
| 156 | 162 | EVQLVESGGGLVQAGGSLRLSCVVSGDVFV | b40 | RYTMA- | SITDSGRTTEYVDSVKG- | NTDYFRIRSLDANT- | 20 |
| | | RYTMAWFRQAPGKEREFVISITDSGRTTEY | | SEQ ID | SEQ ID | SEQ ID | |
| | | VDSVKGRFTVSRDNAKNTVYLQMNNLKPED | | NO: 951 | NO: 952 | NO: 953 | |
| | | TAVYYCAANTDYFRIRSLDANTWGQGTQVT | | | | | |
| | | VSS- | | | | | |
| | | SEQ ID | | | | | |
| | | NO: 162 | | | | | |
| 157 | 163 | EVQLVESGGGLVQAGGSLRLSCVVSGDVFV | b39 | RYTMA- | VVTDSGRTTEYVDSVKG- | NTDYFQIRSVDNNA- | 21 |
| | | RYTMAWFRQAPGKEREFVAVVTDSGRTTEY | | SEQ ID | SEQ ID | SEQ ID | |
| | | VDSVKGRFTVSRDNAKNTVYLQMNNLKPED | | NO: 954 | NO: 955 | NO: 956 | |
| | | TAVYYCAANTDYFQIRSVDNNAWGQGTQVT | | | | | |
| | | VSS- | | | | | |
| | | SEQ ID | | | | | |
| | | NO: 163 | | | | | |
| 158 | 164 | QVQLVESGGGLVQAGGSLRLSCAASGSIFS | b128 | LNTMG- | AISRSGGSATYGDSVKG- | SAAVGWTTRWSTIDFDS- | 28 |
| | | LNTMGWFRQAPGKEREFVAAISRSGGSATY | | SEQ ID | SEQ ID | SEQ ID | |
| | | GDSVKGRFTISTNNAKTTVYLQMNSLKPDD | | NO: 957 | NO: 958 | NO: 959 | |
| | | TAVYSCAASAAVGWTTRWSTIDFDSWGQGT | | | | | |
| | | QVTVSS- | | | | | |
| | | SEQ ID | | | | | |
| | | NO: 164 | | | | | |
| 159 | 165 | QVQLVESGGGLVQAGGSLRLSCTVSGDVFV | b141 | RYTMA- | SVTDSGRTTEYVHSVRG- | NTDYFRIRSLDANT- | 20 |
| | | RYTMAWFRQAPGKEREFVASVTDSGRTTEY | | SEQ ID | SEQ ID | SEQ ID | |
| | | VHSVRGRFTVSRDNAKNTVYLQMNNLKPED | | NO: 960 | NO: 961 | NO: 962 | |
| | | TAVYYCAANTDYFRIRSLDANTWGQGTQVT | | | | | |
| | | VSS- | | | | | |
| | | SEQ ID | | | | | |
| | | NO: 165 | | | | | |
| 160 | 166 | EVQLVESGGGLVQAGDSLRISCAASGRIFS | b3 | NYAMG- | THLTSTTHYADSVKG- | DRNIKITADWSY- | 8 |
| | | NYAMGWFRQAPGKETEFVAGITHLTSTTHY | | SEQ ID | SEQ ID | SEQ ID | |
| | | ADSVKGRFTISRDNAKNTMHLQMNNLKPED | | NO: 963 | NO: 964 | NO: 965 | |
| | | TALYYCAADRNIKITADWSYWGQGTQVTVA | | | | | |
| | | S- | | | | | |
| | | SEQ ID | | | | | |
| | | NO: 166 | | | | | |
| 161 | 167 | QVQLVESGGGLVQAGGSLRLSCAVSGDVFV | b133 | RYTMA- | SVTDSGRTTEYVDSAKG- | NTDYFQIRSLRANT- | 20 |
| | | RYTMAWFRQAPGKEREFVASVTDSGRTTEY | | SEQ ID | SEQ ID | SEQ ID | |
| | | VDSAKGRFTVSRDNAKNTVYLQMNSLKPED | | NO: 966 | NO: 967 | NO: 968 | |
| | | TAVYYCAANTDYFQIRSLRANTWGQGTQVT | | | | | |
| | | VSS- | | | | | |
| | | SEQ ID | | | | | |
| | | NO: 167 | | | | | |
| 162 | 168 | EVQLVESGGGLVQAGGSLRLSCAASGRTFS | b28 | TTEMG- | AITWTGRGTMYAESVEG- | ARRGRAAVRSEGGYDF- | 4 |
| | | TTEMGWFRQAPGKEREFVAAITWTGRGTMY | | SEQ ID | SEQ ID | SEQ ID | |
| | | AESVEGRFTISRENAKNMVYLQMNSLKPED | | NO: 969 | NO: 970 | NO: 971 | |
| | | TAIYYCAAARRGRAAVRSEGGYDFWGQGTQ | | | | | |
| | | VTVSS- | | | | | |
| | | SEQ ID | | | | | |
| | | NO: 168 | | | | | |
| 164 | 169 | QVQLVESGGGLVQAGGSLRLACALSGDVFV | b96 | RYTMA- | SVTDSGRTTDYVASVQG- | NTDYFQIRSLDRNT- | 20 |
| | | RYTMAWFRQAPGKEREFVASVTDSGRTTDY | | SEQ ID | SEQ ID | SEQ ID | |
| | | VASVQGRFTVSRDNNKNTVYLQMNSLKPED | | NO: 972 | NO: 973 | NO: 974 | |
| | | TAVYYCAANTDYFQIRSLDRNTWGQGTQVT | | | | | |
| | | VSS- | | | | | |
| | | SEQ ID | | | | | |
| | | NO: 169 | | | | | |
| 166 | 170 | EVQLVESGGGLVQAGGSLRLSCAASGDVFV | b14 | RYTMA- | SVTDSGRTTDYVDSVKG- | NTDYFQIRSLEFNT- | 20 |
| | | RYTMAWFRQAPGKEREFVASVTDSGRTTDY | | SEQ ID | SEQ ID | SEQ ID | |
| | | VDSVKGRFTVSRDNAKNTVYLQMNNLKPED | | NO: 975 | NO: 976 | NO: 977 | |
| | | TAVYYCAANTDYFQIRSLEFNTWGQGTQVT | | | | | |
| | | VSS- | | | | | |
| | | SEQ ID | | | | | |
| | | NO: 170 | | | | | |
| 167 | 171 | QVQLVESGGGLVQAGGSLRLSCTVSGDVFV | b140 | RYTMA- | LVTDSGRTTEYVDSVKG- | NTDYFRIRSLDANT- | 20 |
| | | RYTMAWFRQAPGKEREFVALVTDSGRTTEY | | SEQ ID | SEQ ID | SEQ ID | |
| | | VDSVKGRFTVSRDNAKNTVYLQMNNLKPED | | NO: 978 | NO: 979 | NO: 980 | |
| | | TAVYYCAANTDYFRIRSLDANTWGQGTQVT | | | | | |
| | | VSS- | | | | | |
| | | SEQ ID | | | | | |
| | | NO: 171 | | | | | |
| 168 | 172 | QLQLVESGGGLVQPGGSLRLSCAAAGRAIE | b69 | NYPVG- | AITWISGSTLYADSVKG- | ALKTITRGQNDYSY- | 1 |
| | | NYPVGWFRRAPGKEREFVAAITWISGSTLY | | SEQ ID | SEQ ID | SEQ ID | |
| | | ADSVKGRFTISRDNAKNTVYLQMSSLKPED | | NO: 981 | NO: 982 | NO: 983 | |
| | | TALYYCAAALKTITRGQNDYSYWGQGTQVT | | | | | |
| | | VSS- | | | | | |
| | | SEQ ID | | | | | |
| | | NO: 172 | | | | | |
| 169 | 173 | QLQLVESGGGLVQTGTSLRLSCAASGHTSR | b71 | INAMG- | AISRNGGSTVYVDSVKG- | TDAVGWTTRWMTADFGF- | 31 |
| | | INAMGWFRQFPGKEREFVAAISRNGGSTVY | | SEQ ID | SEQ ID | SEQ ID | |
| | | VDSVKGRFTISRDNAKSTVYLQMNSLKPED | | NO: 984 | NO: 985 | NO: 986 | |
| | | TAVYYCTATDAVGWTTRWMTADFGFWGQGT | | | | | |
| | | QVTVSS- | | | | | |
| | | SEQ ID | | | | | |
| | | NO: 173 | | | | | |
| 170 | 174 | QVQLVESGGGLVEAGGSLRLSCAASGRAFN | b88 | NFPMG- | AITWISGSTLYADSVKG- | ALKTITRGQHDYTY- | 1 |
| | | NFPMGWFRQAPGKEREFVAAITWISGSTLY | | SEQ ID | SEQ ID | SEQ ID | |
| | | ADSVKGRFTISRDKSKNTVYLQMSGLKPED | | NO: 987 | NO: 988 | NO: 989 | |
| | | TALYYCAAALKTITRGQHDYTYWGQGTQVT | | | | | |
| | | VSS- | | | | | |
| | | SEQ ID | | | | | |
| | | NO: 174 | | | | | |
| 171 | 175 | QVQLVESGGGLVQAGGSLRLACALSGDVFV | b96 | RYTMA- | SVTDSGRTTDYVASVQG- | NTDYFQIRSLDRNT- | 20 |
| | | RYTMAWFRQAPGKEREFVASVTDSGRTTDY | | SEQ ID | SEQ ID | SEQ ID | |
| | | VASVQGRFTVSRDNNKNTVYLQMNSLKPED | | NO: 990 | NO: 991 | NO: 992 | |
| | | TAVYYCAANTDYFQIRSLDRNTWGQGTQVT | | | | | |
| | | VSS- | | | | | |
| | | SEQ ID | | | | | |
| | | NO: 175 | | | | | |
| 172 | 176 | EVQLVESGGGLVQAGGSLRLSCAASGRTFS | b24 | SDAKA- | AITWAGRGTDYADSVKD- | NPTGVIGPGFRNSNRYDY- | 19 |
| | | SDAKAWFRQAPGKEREFVAAITWAGRGTDY | | SEQ ID | SEQ ID | SEQ ID | |
| | | ADSVKDRFTITRDNAKNMVYLQMSSLKPED | | NO: 993 | NO: 994 | NO: 995 | |
| | | TAVYYCALNPTGVIGPGFRNSNRYDYWGQG | | | | | |
| | | TQVTVAS- | | | | | |
| | | SEQ ID | | | | | |
| | | NO: 176 | | | | | |
| 173 | 177 | QVQLVESGGGLVQAGGSLRLSCAAAGRAIE | b98 | NYPVG- | AITWISGSTLYADSVKG- | ALKTITRGQNDYSY- | 1 |
| | | NYPVGWFRRAPGKEREFVAAITWISGSTLY | | SEQ ID | SEQ ID | SEQ ID | |
| | | ADSVKGRFTISRDNAKNTVYLQMSSLKPED | | NO: 996 | NO: 997 | NO: 998 | |
| | | TALYYCAAALKTITRGQNDYSYWGQGTQVT | | | | | |
| | | VSS- | | | | | |
| | | SEQ ID | | | | | |
| | | NO: 177 | | | | | |
| 174 | 178 | EVQLVESGGGLVQAGGSLRLSCVVSGDVFV | b39 | RYTMA- | VVTDSGRTTEYVDSVKG- | NTDYFQIRSVDNNA- | 21 |
| | | RYTMAWFRQAPGKEREFVAVVTDSGRTTEY | | SEQ ID | SEQ ID | SEQ ID | |
| | | VDSVKGRFTVSRDNAKNTVYLQMNNLKPED | | NO: 999 | NO: 1000 | NO: 1001 | |
| | | TAVYYCAANTDYFQIRSVDNNAWGQGTQVT | | | | | |
| | | VSS- | | | | | |
| | | SEQ ID | | | | | |
| | | NO: 178 | | | | | |
| 175 | 179 | QVQLVESGGGLVQAGGSLRLSCAASGRTFS | b126 | TTEMG- | AITWTGRGTMYAESVEG- | ARRGRAAVRSEGGYDF- | 4 |
| | | TTEMGWFRQAPGKEREFVAAITWTGRGTMY | | SEQ ID | SEQ ID | SEQ ID | |
| | | AESVEGRFTISRENAKNMVYLQMNSLKPED | | NO: 1002 | NO: 1003 | NO: 1004 | |
| | | TAIYYCAAARRGRAAVRSEGGYDFWGQGTQ | | | | | |
| | | VTVSS- | | | | | |
| | | SEQ ID | | | | | |
| | | NO: 179 | | | | | |
| 176 | 180 | EVQLVESGGGLVQAGGSLRLSCAASGDVFV | b13 | RYTMA- | SVTDSGRTTDYVDSVKG- | NTDYFQIKSLDRNT- | 20 |
| | | RYTMAWFRQAPGKEREFVASVTDSGRTTDY | | SEQ ID | SEQ ID | SEQ ID | |
| | | VDSVKGRFTVSRDNAKNTVYLQMNNLKPED | | NO: 1005 | NO: 1006 | NO: 1007 | |
| | | TAVYYCAANTDYFQIKSLDRNTWGQGTQVT | | | | | |
| | | VSS- | | | | | |
| | | SEQ ID | | | | | |
| | | NO: 180 | | | | | |
| 177 | 181 | EVQLVESGGGLVQAGGSLRLSCAASGRTFS | b26 | TTEMG- | AITWTGRGTMYAESVEG- | ARRGRAAVRSEGGYDF- | 4 |
| | | TTEMGWFRQAPGKEREFVAAITWTGRGTMY | | SEQ ID | SEQ ID | SEQ ID | |
| | | AESVEGRFTISRENAKNMVYLQMNSLKPED | | NO: 1008 | NO: 1009 | NO: 1010 | |
| | | TAIYYCAAARRGRAAVRSEGGYDFWGQGTQ | | | | | |
| | | ATVSS- | | | | | |
| | | SEQ ID | | | | | |
| | | NO: 181 | | | | | |
| 179 | 182 | QVQLVESGGGLVQAGGSLRLSCAVSGDVFV | b136 | RYTMA- | SVTDSGRTTEYVDSVKG- | NTDYFQIRSLRANT- | 20 |
| | | RYTMAWFRQAPGKEREFVASVTDSGRTTEY | | SEQ ID | SEQ ID | SEQ ID | |
| | | VDSVKGRFTVSRDNAKNTVYLQMNSLKPED | | NO: 1011 | NO: 1012 | NO: 1013 | |
| | | TAVYYCAANTDYFQIRSLRANTWGQGTQVT | | | | | |
| | | VSS- | | | | | |
| | | SEQ ID | | | | | |
| | | NO: 182 | | | | | |
| 180 | 183 | QVQLQESGGGLVQAGDSLRISCAASGRIFS | b72 | NYAMG- | THLTSTTHYADSVKG- | DRNIKITADWSY- | 8 |
| | | NYAMGWFRQAPGKETEFVAGITHLTSTTHY | | SEQ ID | SEQ ID | SEQ ID | |
| | | ADSVKGRFTISRDNAKNTMHLQMNNLKPED | | NO: 1014 | NO: 1015 | NO: 1016 | |
| | | TALYYCAADRNIKITADWSYWGQGTQVTVA | | | | | |
| | | S- | | | | | |
| | | SEQ ID | | | | | |
| | | NO: 183 | | | | | |
| 181 | 184 | QVQLQESGGGLVQAGGSLRLSCAASGRTFS | b79 | NYVMA- | AITQTGRGTFYADSVEG- | PRSGRAGTRNQMDYEY- | 22 |
| | | NYVMAWFRQAPGKEREFVGAITQTGRGTFY | | SEQ ID | SEQ ID | SEQ ID | |
| | | ADSVEGRFTISRINDKNTVYLQMNSLKPED | | NO: 1017 | NO: 1018 | NO: 1019 | |
| | | TAVYYCSAPRSGRAGTRNQMDYEYWGQGTQ | | | | | |
| | | VTVSS- | | | | | |
| | | SEQ ID | | | | | |
| | | NO: 184 | | | | | |
| 182 | 185 | EVQLVESGGGLVQAGGSLRLSCAASGRDFS | b20 | SYAMG- | AITWTKRSTDFPDSVKG- | ARGLPVTPLGDIIY- | 3 |
| | | SYAMGWFRQAPGKEREFWVAITWTKRSTDF | | SEQ ID | SEQ ID | SEQ ID | |
| | | PDSVKGRFTISRDNAKNTVYLDMNSLKPED | | NO: 1020 | NO: 1021 | NO: 1022 | |
| | | TAVYYCASARGLPVTPLGDIIYWGEGTLVT | | | | | |
| | | VSS- | | | | | |
| | | SEQ ID | | | | | |
| | | NO: 185 | | | | | |
| 183 | 186 | QLQLVESGGGLVQAGGSLRLSCAASGRDFS | b67 | SYAMG- | AITWTKRSTDFPDSVKG- | ARGLPVTPLGDIIY- | 3 |
| | | SYAMGWFRQAPGKEREFWAITWTKRSTDFP | | SEQ ID | SEQ ID | SEQ ID | |
| | | DSVKGRFTISRDNAKNTVYLDMNSLKPEDT | | NO: 1023 | NO: 1024 | NO: 1025 | |
| | | AVYYCASARGLPVTPLGDIIYWGEGTLVTV | | | | | |
| | | SS- | | | | | |
| | | SEQ ID | | | | | |
| | | NO: 186 | | | | | |
| 184 | 187 | EVQLVESGGGLVQAGGSLRLSCAASGRTFS | b27 | TTEMG- | AITWTGRGTMYAESVEG- | ARRGRAAVRSEGGYDF- | 4 |
| | | TTEMGWFRQAPGKEREFVAAITWTGRGTMY | | SEQ ID | SEQ ID | SEQ ID | |
| | | AESVEGRFTISRENAKNMVYLQMNSLKPED | | NO: 1026 | NO: 1027 | NO: 1028 | |
| | | TAIYYCAAARRGRAAVRSEGGYDFWGQGTQ | | | | | |
| | | VAVSS- | | | | | |
| | | SEQ ID | | | | | |
| | | NO: 187 | | | | | |
| 185 | 188 | QVQLQESGGGLVQAGGSLRLSCAVSGRSFR | b80 | NYVMG- | GITQFTSTTYYDDSVKG- | DRSIKMTADWAY- | 10 |
| | | NYVMGWFRQAPGREREIVAGITQFTSTTYY | | SEQ ID | SEQ ID | SEQ ID | |
| | | DDSVKGRFTISRDNAKNTVYLQMNSLKPED | | NO: 1029 | NO: 1030 | NO: 1031 | |
| | | TALYYCAADRSIKMTADWAYWGQGTQVTVS | | | | | |
| | | S- | | | | | |
| | | SEQ ID | | | | | |
| | | NO: 188 | | | | | |
| 186 | 189 | QVQLVESGGGLVQAGGSLRLSCAASGRADS | b115 | NAIMA- | AVTYSGMPTYQDDSVQG- | RMYSASTYYGDYDY- | 25 |
| | | NAIMAWFRQAPGKEREFIVAVTYSGMPTYQ | | SEQ ID | SEQ ID | SEQ ID | |
| | | DDSVQGRFTASRDNAKNTVYLQMNSLKPED | | NO: 1032 | NO: 1033 | NO: 1034 | |
| | | TAVYYCAARMYSASTYYGDYDYWGQGTQVT | | | | | |
| | | VSS- | | | | | |
| | | SEQ ID | | | | | |
| | | NO: 189 | | | | | |
| 187 | 190 | EVQLVESGGGSVQAGGSLRLSCAASGRTFS | b60 | DYTMG- | AITGTGHTTDMPDSVEG- | ARGLPVTPLGDIIY- | 3 |
| | | DYTMGWFRQAPGKEREFWVAITGTGHTTDM | | SEQ ID | SEQ ID | SEQ ID | |
| | | PDSVEGRFTISRDNAKNTIYLDMKNLKPGD | | NO: 1035 | NO: 1036 | NO: 1037 | |
| | | TAVYYCASARGLPVTPLGDIIYWGEGTLVT | | | | | |
| | | VSS- | | | | | |
| | | SEQ ID | | | | | |
| | | NO: 190 | | | | | |
| 188 | 191 | QVQLVESGGGLVQAGGSLTLSCAASGGAFS | b146 | SDAKA- | AITWAGRGTDYADSVKG- | NPRGVIGPAFRNSNHYTY- | 19 |
| | | SDAKAWFRQAPGKEREFVAAITWAGRGTDY | | SEQ ID | SEQ ID | SEQ ID | |
| | | ADSVKGRFTITRDNAKATVHLQMNSLKPED | | NO: 1038 | NO: 1039 | NO: 1040 | |
| | | TAVYYCALNPRGVIGPAFRNSNHYTYWGQG | | | | | |
| | | TQVTVSS- | | | | | |
| | | SEQ ID | | | | | |
| | | NO: 191 | | | | | |
| 189 | 192 | QVQLQESGGGLVQAGGSMRLSCAASGRTFS | b83 | NYVIA- | AITQTGRGTFYASSVEG- | PRSGRAGTRNQMDYEY- | 22 |
| | | NYVIAWFRQAPGKEREFVGAITQTGRGTFY | | SEQ ID | SEQ ID | SEQ ID | |
| | | ASSVEGRFTLSRLNDQSTVYLQMNSLNPED | | NO: 1041 | NO: 1042 | NO: 1043 | |
| | | TGVYYCSAPRSGRAGTRNQMDYEYWGQGTQ | | | | | |
| | | VTVSS- | | | | | |
| | | SEQ ID | | | | | |
| | | NO: 192 | | | | | |
| 190 | 193 | QLQLVESGGGLVQTGTSLRLSCAASGHTSR | b71 | INAMG- | AISRNGGSTVYVDSVKG- | TDAVGWTTRWMTADFGF- | 31 |
| | | INAMGWFRQFPGKEREFVAAISRNGGSTVY | | SEQ ID | SEQ ID | SEQ ID | |
| | | VDSVKGRFTISRDNAKSTVYLQMNSLKPED | | NO: 1044 | NO: 1045 | NO: 1046 | |
| | | TAVYYCTATDAVGWTTRWMTADFGFWGQGT | | | | | |
| | | QVTVSS- | | | | | |
| | | SEQ ID | | | | | |
| | | NO: 193 | | | | | |
| 194 | 194 | QVQLVESGGGLVQAGGSLRLSCAASGFTFS | b110 | NYAMS- | SITGFGRGTDYADSVKG- | YSSSTYYPPTPARGTDY- | 38 |
| | | NYAMSWVRQAPGKGLEWVSSITGFGRGTDY | | SEQ ID | SEQ ID | SEQ ID | |
| | | ADSVKGRFTISRDNAKNTLYLQMNSLKPED | | NO: 1047 | NO: 1048 | NO: 1049 | |
| | | TAVYYCARYSSSTYYPPTPARGTDYRGQGT | | | | | |
| | | QVTVSS- | | | | | |
| | | SEQ ID | | | | | |
| | | NO: 194 | | | | | |
| 196 | 195 | QVQLVESGGGLVQPGGSLGLSCAASGFTFD | b151 | NYAMS- | SITGAGRGTHYADSVKG- | YSSSTYYPPTPARGTDY- | 38 |
| | | NYAMSWVRQAPGKGLEWVSSITGAGRGTHY | | SEQ ID | SEQ ID | SEQ ID | |
| | | ADSVKGRFTISRDNAKNTLYLQMNSLKPED | | NO: 1050 | NO: 1051 | NO: 1052 | |
| | | TAVYYCAKYSSSTYYPPTPARGTDYRGPGT | | | | | |
| | | QVTVSS- | | | | | |
| | | SEQ ID | | | | | |
| | | NO: 195 | | | | | |
| 197 | 196 | QVQLVESGGGLVQAGGSLRLSCAASGGTFS | b114 | SYAMG- | ATTRGGGRTMYAVSTEG- | MTSYYSGTYYPDSSDFDI- | 18 |
| | | SYAMGWFRQAPGKEREFVAATTRGGGRTMY | | SEQ ID | SEQ ID | SEQ ID | |
| | | AVSTEGRFTCSRDNAKNTVYLLMNSLKPED | | NO: 1053 | NO: 1054 | NO: 1055 | |
| | | TAVYYCAAMTSYYSGTYYPDSSDFDIWGQG | | | | | |
| | | TQVTVSS- | | | | | |
| | | SEQ ID | | | | | |
| | | NO: 196 | | | | | |
| 198 | 197 | QVQLVESGGGLVQVGGSLRVSCAASGRTSG | b173 | DRNMG- | IITWSSGSTVYADSVKG- | DYYPYSGSWNIMDY- | 13 |
| | | DRNMGWFRQAPGKEREFVGIITWSSGSTVY | | SEQ ID | SEQ ID | SEQ ID | |
| | | ADSVKGRFTISRDNAKNTVYLDMSSLKPED | | NO: 1056 | NO: 1057 | NO: 1058 | |
| | | TAVYYCAADYYPYSGSWNIMDYWGKGTLVT | | | | | |
| | | VSS- | | | | | |
| | | SEQ ID | | | | | |
| | | NO: 197 | | | | | |
| 199 | 198 | EVQLVESGGGLVQAGGSLRLSCAASGGTFS | b16 | SYAMG- | ATTRGGGRTMYAVSTEG- | RTSYYSGTYYPASSDFDI- | 27 |
| | | SYAMGWFRQAPGKEREFVAATTRGGGRTMY | | SEQ ID | SEQ ID | SEQ ID | |
| | | AVSTEGRFTCSRDNAKNTVYLLMNRVKPED | | NO: 1059 | NO: 1060 | NO: 1061 | |
| | | TAVYYCAARTSYYSGTYYPASSDFDIWGQG | | | | | |
| | | TQVTVSS- | | | | | |
| | | SEQ ID | | | | | |
| | | NO: 198 | | | | | |
| 200 | 199 | QVQLVESGGGSVQTGGSLRLSCVVSGSHFI | b177 | SDVMG- | DMADGGSAKYADSVKG- | GLWITGRHSDY- | 14 |
| | | SDVMGWYRQVPGKQRELVADMADGGSAKYA | | SEQ ID | SEQ ID | SEQ ID | |
| | | DSVKGRFTILRDSVKNTVTLQMSSLNPEDT | | NO: 1062 | NO: 1063 | NO: 1064 | |
| | | GVYYCKAGLWITGRHSDYWGQGTQVTVTS- | | | | | |
| | | SEQ ID | | | | | |
| | | NO: 199 | | | | | |
| 201 | 200 | QVQLVESGGGLVQAGGSLRLSCAASGGTFS | b113 | SYAMG- | ATTRGGGRTMYAVSTEG- | MTSYYSGTYYPDSSDFDI- | 18 |
| | | SYAMGWFRQAPGKEREFVAATTRGGGRTMY | | SEQ ID | SEQ ID | SEQ ID | |
| | | AVSTEGRFTCSRDNAENTVYLQMNSLKPED | | NO: 1065 | NO: 1066 | NO: 1067 | |
| | | TAIYYCAAMTSYYSGTYYPDSSDFDIWGQG | | | | | |
| | | TQVTVSS- | | | | | |
| | | SEQ ID | | | | | |
| | | NO: 200 | | | | | |
| 202 | 201 | EVQLVESGGGLVQVGDSLRLSCAASGRTVG | b59 | SANMG- | VITWSTGSTVYADSVKG- | DVYPYSGNLNIMDY- | 13 |
| | | SANMGWFRQAPGKEREFVAVITWSTGSTVY | | SEQ ID | SEQ ID | SEQ ID | |
| | | ADSVKGRFTISRDNAKNTVYLDMSSLKPDD | | NO: 1068 | NO: 1069 | NO: 1070 | |
| | | TAVYYCAADVYPYSGNLNIMDYWGKGTLVT | | | | | |
| | | VSS- | | | | | |
| | | SEQ ID | | | | | |
| | | NO: 201 | | | | | |
| 203 | 202 | QVQLVESGGGLVQVGDSLRLSCAASGRTVG | b172 | SANMG- | VITWSTGSTVYADSVKG- | DVYPYSGNLNIMDY- | 13 |
| | | SANMGWFRQAPGKEREFVAVITWSTGSTVY | | SEQ ID | SEQ ID | SEQ ID | |
| | | ADSVKGRFTISRDNAKNTVYLDMSSLKPED | | NO: 1071 | NO: 1072 | NO: 1073 | |
| | | TAVYYCAADVYPYSGNLNIMDYWGKGTLVT | | | | | |
| | | VSS- | | | | | |
| | | SEQ ID | | | | | |
| | | NO: 202 | | | | | |
| 204 | 203 | QVQLQESGGGLVQTGGSLRLSCAVSGSRFI | b85 | SDVMG- | DMADGGSAKYADSVKG- | GLWLAGRHSDY- | 14 |
| | | SDVMGWYRQVPGKQRELVADMADGGSAKYA | | SEQ ID | SEQ ID | SEQ ID | |
| | | DSVKGRFSILRDSVKNTVYLQMSSLKPEDT | | NO: 1074 | NO: 1075 | NO: 1076 | |
| | | GIYYCKAGLWLAGRHSDYWGQGTQVTVSS- | | | | | |
| | | SEQ ID | | | | | |
| | | NO: 203 | | | | | |
| 205 | 204 | QVQLVESGGGLVQVGGSLSVSCAASGRSFD | b175 | SITMA- | GINFSGSRTAYGDSVKG- | SPRGFYGPGHALYDY- | 29 |
| | | SITMAYFRQAPGNEREFIAGINFSGSRTAY | | SEQ ID | SEQ ID | SEQ ID | |
| | | GDSVKGRFTISRDNAKNTVFLQMNSLNPED | | NO: 1077 | NO: 1078 | NO: 1079 | |
| | | TAVYYCAASPRGFYGPGHALYDYWGQGTQV | | | | | |
| | | TVSS- | | | | | |
| | | SEQ ID | | | | | |
| | | NO: 204 | | | | | |
| 206 | 205 | QVQLVESGGGLVQPGGSLRLSCAASGFTFS | b156 | NYAMS- | SITGAGRGTYYADSVKG- | YDSSTYYPPTPARGIAD- | 36 |
| | | NYAMSWVRQAPGKGLEWVSSITGAGRGTYY | | SEQ ID | SEQ ID | SEQ ID | |
| | | ADSVKGRFTISRDNDKNTLYLQMNSLKPED | | NO: 1080 | NO: 1081 | NO: 1082 | |
| | | TAVYYCAKYDSSTYYPPTPARGIADRGQGI | | | | | |
| | | QVTVSS- | | | | | |
| | | SEQ ID | | | | | |
| | | NO: 205 | | | | | |
| 207 | 206 | EVQLVESGGGLVQPGGSLRLSCAISGGTLD | b49 | SYGIG- | CMSRSDDRTFYADSVKG- | VDAYGCSLVQPTTYDF- | 34 |
| | | SYGIGWVRQAPGKQREGVSCMSRSDDRTFY | | SEQ ID | SEQ ID | SEQ ID | |
| | | ADSVKGRFTISKDNAKSTVYLQMTNLKPDD | | NO: 1083 | NO: 1084 | NO: 1085 | |
| | | TAVYYCAAVDAYGCSLVQPTTYDFWGLGTQ | | | | | |
| | | VTVSS- | | | | | |
| | | SEQ ID | | | | | |
| | | NO: 206 | | | | | |
| 209 | 207 | EVQLVESGGGSVQTGGSLRLSCVVSGSHFI | b62 | SDVMG- | DMADGGSVKYGDSVKG- | GLWITGRHFDY- | 14 |
| | | SDVMGWYRQVPGKQRELVADMADGGSVKYG | | SEQ ID | SEQ ID | SEQ ID | |
| | | DSVKGRFTILRDSVKNTVTLQMSSLNPEDT | | NO: 1086 | NO: 1087 | NO: 1088 | |
| | | GVYYCKAGLWITGRHFDYWGQGTQVTVTS- | | | | | |
| | | SEQ ID | | | | | |
| | | NO: 207 | | | | | |
| 210 | 208 | QLQLVESGGGLVQTGGSLRLSCAVSGSRFI | b70 | SDVMG- | DMADGGSAKYADSVKG- | GLWIAGRHSDY- | 14 |
| | | SDVMGWYRQVPGKQRELVADMADGGSAKYA | | SEQ ID | SEQ ID | SEQ ID | |
| | | DSVKGRFSILRDSVKNTVYLQMSSLKPEDT | | NO: 1089 | NO: 1090 | NO: 1091 | |
| | | GIYYCKAGLWIAGRHSDYWGQGTQVTVSS- | | | | | |
| | | SEQ ID | | | | | |
| | | NO: 208 | | | | | |
| 212 | 209 | QVQLVESGGGLVQVGDSLRLSCAASGRTVG | b171 | SANMG- | VITWSTGSTVYADSVKG- | DVYPYSGNLNIMDY- | 13 |
| | | SANMGWFRQAPGKEREFVAVITWSTGSTVY | | SEQ ID | SEQ ID | SEQ ID | |
| | | ADSVKGRFTISRDNAKNTVYLDLSSLKPED | | NO: 1092 | NO: 1093 | NO: 1094 | |
| | | TAVYYCAADVYPYSGNLNIMDYWGKGTQVT | | | | | |
| | | VSS- | | | | | |
| | | SEQ ID | | | | | |
| | | NO: 209 | | | | | |
| 213 | 210 | QVQLVESGGGLVQPGGSLRLSCAVSGGTLH | b161 | DYGIG- | CMSRSDDKTYYADYVKG- | VDAYGCSLVQPTTYDY- | 34 |
| | | DYGIGWIRQAPGKQREGVSCMSRSDDKTYY | | SEQ ID | SEQ ID | SEQ ID | |
| | | ADYVKGRFTISKDNAKNTVYLQMISLKPED | | NO: 1095 | NO: 1096 | NO: 1097 | |
| | | TAVYYCAAVDAYGCSLVQPTTYDYWGQGTQ | | | | | |
| | | VTVSS- | | | | | |
| | | SEQ ID | | | | | |
| | | NO: 210 | | | | | |
| 214 | 211 | QVQLVESGGTLVQTGGSLRLSCVVSGSHFI | b180 | SDVMG- | DMADGGSAKYGDSVKG- | GLWIKGRHSDY- | 14 |
| | | SDVMGWYRQVPGKQRELVADMADGGSAKYG | | SEQ ID | SEQ ID | SEQ ID | |
| | | DSVKGRFTIVRDSVKNTVYLQMSSLNPEDT | | NO: 1098 | NO: 1099 | NO: 1100 | |
| | | GVYYCKAGLWIKGRHSDYWGQGTQVTVTS- | | | | | |
| | | SEQ ID | | | | | |
| | | NO: 211 | | | | | |
| 215 | 212 | QVQLVESGGGLVQPGGSLGLSCAASGFTFD | b151 | NYAMS- | SITGAGRGTHYADSVKG- | YSSSTYYPPTPARGTDY- | 38 |
| | | NYAMSWVRQAPGKGLEWVSSITGAGRGTHY | | SEQ ID | SEQ ID | SEQ ID | |
| | | ADSVKGRFTISRDNAKNTLYLQMNSLKPED | | NO: 1101 | NO: 1102 | NO: 1103 | |
| | | TAVYYCAKYSSSTYYPPTPARGTDYRGPGT | | | | | |
| | | QVTVSS- | | | | | |
| | | SEQ ID | | | | | |
| | | NO: 212 | | | | | |
| 217 | 213 | EVQLVESGGGSVQTGGSLRLSCVVSGSHFI | b62 | SDVMG- | DMADGGSVKYGDSVKG- | GLWITGRHFDY- | 14 |
| | | SDVMGWYRQVPGKQRELVADMADGGSVKYG | | SEQ ID | SEQ ID | SEQ ID | |
| | | DSVKGRFTILRDSVKNTVTLQMSSLNPEDT | | NO: 1104 | NO: 1105 | NO: 1106 | |
| | | GVYYCKAGLWITGRHFDYWGQGTQVTVTS- | | | | | |
| | | SEQ ID | | | | | |
| | | NO: 213 | | | | | |
| 218 | 214 | QVQLVESGGGLVQTGGSLRLSCAASGSQFI | b165 | NDVMG- | DMDDTGSTKYADSVKG- | GLWIKGRHSDY- | 14 |
| | | NDVMGWYRQVPGKQRELVADMDDTGSTKYA | | SEQ ID | SEQ ID | SEQ ID | |
| | | DSVKGRFTILRDSVKNTAYLQMSNLKPEDT | | NO: 1107 | NO: 1108 | NO: 1109 | |
| | | GVYYCKAGLWIKGRHSDYWGQGTQVTVSS- | | | | | |
| | | SEQ ID | | | | | |
| | | NO: 214 | | | | | |
| 219 | 215 | EVQLVESGGGLVQAGASLELSCAASGGTFS | b2 | SYAMG- | ATTRGGGRTMYAVSTEG- | RTSYYDGTYYPASSDFDI- | 27 |
| | | SYAMGWFRQAPGKEREFVAATTRGGGRTMY | | SEQ ID | SEQ ID | SEQ ID | |
| | | AVSTEGRFSCSRDNAKNTVNLLIKNLKPED | | NO: 1110 | NO: 1111 | NO: 1112 | |
| | | TAVYYCAARTSYYDGTYYPASSDFDIWGQG | | | | | |
| | | TQVTVSS- | | | | | |
| | | SEQ ID | | | | | |
| | | NO: 215 | | | | | |
| 220 | 216 | QVQLVESGGGLVQPGGSLRLSCAASGFTFS | b155 | NYAMS- | SSITSAGRGTHYADTVKG- | YSSATYYPPTPAQGRDY- | 38 |
| | | NYAMSWVRQAPGKELEWVSSITSAGRGTHY | | SEQ ID | SEQ ID | SEQ ID | |
| | | ADTVKGRFTISRDNDENTLYLQMNSLEPED | | NO: 1113 | NO: 1114 | NO: 1115 | |
| | | TAVYYCAKYSSATYYPPTPAQGRDYRGQGT | | | | | |
| | | QVTVSS- | | | | | |
| | | SEQ ID | | | | | |
| | | NO: 216 | | | | | |
| 221 | 217 | QVQLVESGGGLVQTGGSLRLSCAVSGSHFI | b167 | SDVMG- | DMADGNSAKYADSVKG- | GLWIAGRHSDY- | 14 |
| | | SDVMGWYRQVPEKQRELVADMADGNSAKYA | | SEQ ID | SEQ ID | SEQ ID | |
| | | DSVKGRFSILRDSVKNTVYLQMSSLKPEDT | | NO: 1116 | NO: 1117 | NO: 1118 | |
| | | GIYYCKAGLWIAGRHSDYWGQGTQVTVSS- | | | | | |
| | | SEQ ID | | | | | |
| | | NO: 217 | | | | | |
| 222 | 218 | EVQLVESGGGLVQTGGSLRLSCAASGSQFI | b53 | NDVMG- | DMDDTGSTKYADSVKG- | GLWIKGRHSDY- | 14 |
| | | NDVMGWYRQVPGKQRELVADMDDTGSTKYA | | SEQ ID | SEQ ID | SEQ ID | |
| | | DSVKGRFTILRDSVKNTAYLQMSNLKPEDT | | NO: 1119 | NO: 1120 | NO: 1121 | |
| | | GVYYCKAGLWIKGRHSDYWGQGTQVTVSS- | | | | | |
| | | SEQ ID | | | | | |
| | | NO: 218 | | | | | |
| 224 | 219 | QVQLVESGGGLVQAGGSLALSCAASGGTFS | b92 | SYAMG- | ATTRGGGRTMYAVSTEG- | RTSYYDGTYYPASSDFDI- | 27 |
| | | SYAMGWFRQAPGKEREFVAATTRGGGRTMY | | SEQ ID | SEQ ID | SEQ ID | |
| | | AVSTEGRFSCSRDNAKNTVYLLIKNLKPED | | NO: 1122 | NO: 1123 | NO: 1124 | |
| | | TAVYYCAARTSYYDGTYYPASSDFDIWGQG | | | | | |
| | | TQVTVSS- | | | | | |
| | | SEQ ID | | | | | |
| | | NO: 219 | | | | | |
| 226 | 220 | EVQLVESGGGLVQAGGSLRLACALSGDVFV | b8 | RYTMA- | SVTDSGRTTDYVASVQG- | NTDYFQIRSLDRNT- | 20 |
| | | RYTMAWFRQAPGKEREFVASVTDSGRTTDY | | SEQ ID | SEQ ID | SEQ ID | |
| | | VASVQGRFTVSRDNNKNTVYLQMNSLKPED | | NO: 1125 | NO: 1126 | NO: 1127 | |
| | | TAVYYCAANTDYFQIRSLDRNTWGQGTQVT | | | | | |
| | | VSS- | | | | | |
| | | SEQ ID | | | | | |
| | | NO: 220 | | | | | |
| 229 | 221 | EVQLVESGGGLVQAGGSLRLSCAVSGVIFW | b35 | SDVVG- | TINLDDTKHYGEVVKG- | RRGSEFY- | 26 |
| | | SDVVGWYRQASGKQRELVATINLDDTKHYG | | SEQ ID | SEQ ID | SEQ ID | |
| | | EVVKGRFAISRDSHKNAYYLQLNSLKPEDT | | NO: 1128 | NO: 1129 | NO: 1130 | |
| | | AVYYCNVRRGSEFYWGQGTQVTVSS- | | | | | |
| | | SEQ ID | | | | | |
| | | NO: 221 | | | | | |
| 231 | 222 | EVQLVESGGGLVQIGGSLRLSCAASGRTFS | b46 | SITMA- | GINFSGTRTFYADSVKG- | SPRGFYGPGNALYDY- | 29 |
| | | SITMAYFRQVPGKEREWVAGINFSGTRTFY | | SEQ ID | SEQ ID | SEQ ID | |
| | | ADSVKGRFLISRDDAKSTMYLQMNSLKPED | | NO: 1131 | NO: 1132 | NO: 1133 | |
| | | TAVYYCAASPRGFYGPGNALYDYWGQGTQV | | | | | |
| | | TVSS- | | | | | |
| | | SEQ ID | | | | | |
| | | NO: 222 | | | | | |
| 232 | 223 | QLQLVESGGGLVQAGGSLALSCAASGGTFS | b65 | SYAMG- | ATTRGGGRTMYAVSTEG- | RTSYYDGTYYPASSDFDI- | 27 |
| | | SYAMGWFRQAPGKEREFVAATTRGGGRTMY | | SEQ ID | SEQ ID | SEQ ID | |
| | | AVSTEGRFSCSRDNAKNTVYLLIKNLKPED | | NO: 1134 | NO: 1135 | NO: 1136 | |
| | | TAVYYCAARTSYYDGTYYPASSDFDIWGQG | | | | | |
| | | TQVTVSS- | | | | | |
| | | SEQ ID | | | | | |
| | | NO: 223 | | | | | |
| 233 | 224 | EVQLVESGGGLVQTGGSLRLSCAVSGSRFI | b56 | SDVMG- | DMADGGSAKYADSVKG- | GLWIAGRHSDY- | 14 |
| | | SDVMGWYRQVPGKARELVADMADGGSAKYA | | SEQ ID | SEQ ID | SEQ ID | |
| | | DSVKGRFSIVRDSGKSTMYLQMSSLKPEDT | | NO: 1137 | NO: 1138 | NO: 1139 | |
| | | GMYYCKAGLWIAGRHSDYWGQGTQVTVSS- | | | | | |
| | | SEQ ID | | | | | |
| | | NO: 224 | | | | | |
| 235 | 225 | QVQLVESGGGLVQAGGSLRLACALSGDVFV | b96 | RYTMA- | SVTDSGRTTDYVASVQG- | NTDYFQIRSLDRNT- | 20 |
| | | RYTMAWFRQAPGKEREFVASVTDSGRTTDY | | SEQ ID | SEQ ID | SEQ ID | |
| | | VASVQGRFTVSRDNNKNTVYLQMNSLKPED | | NO: 1140 | NO: 1141 | NO: 1142 | |
| | | TAVYYCAANTDYFQIRSLDRNTWGQGTQVT | | | | | |
| | | VSS- | | | | | |
| | | SEQ ID | | | | | |
| | | NO: 225 | | | | | |
| 237 | 226 | QVQLVESGGGLVQAGRSLGLSCAASGFTFD | b148 | NYAMS- | SITGAGRGTHYADSVKG- | YSSSTYYPPTPARGTDY- | 38 |
| | | NYAMSWVRQAPGKGLEWVSSITGAGRGTHY | | SEQ ID | SEQ ID | SEQ ID | |
| | | ADSVKGRFTISRDNAKNTLYLQMNSLKPED | | NO: 1143 | NO: 1144 | NO: 1145 | |
| | | TAVYYCAKYSSSTYYPPTPARGTDYRGPGT | | | | | |
| | | QVTVSS- | | | | | |
| | | SEQ ID | | | | | |
| | | NO: 226 | | | | | |
| 238 | 227 | QVQLQESGGGLVQTGGSLRLSCAASGSQFI | b84 | NDVMG- | DMDDTGSTKYADSVKG- | GLWIKGRHSDY- | 14 |
| | | NDVMGWYRQVPGKQRELVADMDDTGSTKYA | | SEQ ID | SEQ ID | SEQ ID | |
| | | DSVKGRFTILRDSVKNTAYLQMSNLKPEDT | | NO: 1146 | NO: 1147 | NO: 1148 | |
| | | GVYYCKAGLWIKGRHSDYWGQGTQVTVSS- | | | | | |
| | | SEQ ID | | | | | |
| | | NO: 227 | | | | | |
| 241 | 228 | QVQLVESGGGLVEAGGSLRLSCAASGRAFN | b88 | NFPMG- | AITWISGSTLYADSVKG- | ALKTITRGQHDYTY- | 1 |
| | | NFPMGWFRQAPGKEREFVAAITWISGSTLY | | SEQ ID | SEQ ID | SEQ ID | |
| | | ADSVKGRFTISRDKSKNTVYLQMSGLKPED | | NO: 1149 | NO: 1150 | NO: 1151 | |
| | | TALYYCAAALKTITRGQHDYTYWGQGTQVT | | | | | |
| | | VSS- | | | | | |
| | | SEQ ID | | | | | |
| | | NO: 228 | | | | | |
| 243 | 229 | QVQLVESGGGLVQAGDSLRLSCAASGRSLS | b89 | TDCMG- | GITWGTGSTLYADSVEG- | DRYCYRGTVYRD- | 11 |
| | | TDCMGWVRQAPGKEREFVAGITWGTGSTLY | | SEQ ID | SEQ ID | SEQ ID | |
| | | ADSVEGRFTISKDNAKNTGYLQMSSLKPED | | NO: 1152 | NO: 1153 | NO: 1154 | |
| | | TAVYYCAVDRYCYRGTVYRDWGRGTQVTVS | | | | | |
| | | S- | | | | | |
| | | SEQ ID | | | | | |
| | | NO: 229 | | | | | |
| 244 | 230 | EVQLVESGGGLVQAGGSLRLSCAASGDVFV | b11 | RYTMA- | SVTDSGRTTDYGDSVKG- | NTDYFQIRSLDANT- | 20 |
| | | RYTMAWFRQAPGKEREFVASVTDSGRTTDY | | SEQ ID | SEQ ID | SEQ ID | |
| | | GDSVKGRFTVSRDNAKNTVYLQMNNLKPED | | NO: 1155 | NO: 1156 | NO: 1157 | |
| | | TAVYYCAANTDYFQIRSLDANTWGQGTQVT | | | | | |
| | | VSS- | | | | | |
| | | SEQ ID | | | | | |
| | | NO: 230 | | | | | |
| 245 | 231 | QVQLVESGGGLVQAGGSLRLSCAVSGDVFV | b137 | RYTMA- | TVTDSGRTTEYVDSVKG- | NTDYFRIRSLDANT- | 20 |
| | | RYTMAWFRQAPGKEREFVATVTDSGRTTEY | | SEQ ID | SEQ ID | SEQ ID | |
| | | VDSVKGRFTVSRDNAKNTVYLQMNNLKPED | | NO: 1158 | NO: 1159 | NO: 1160 | |
| | | TAVYYCAANTDYFRIRSLDANTWGQGTQVT | | | | | |
| | | VSS- | | | | | |
| | | SEQ ID | | | | | |
| | | NO: 231 | | | | | |
| 246 | 232 | QVQLVESGGGLVQAGGSLRLSCAASGRTFS | b124 | SYVMG- | AITGTRRTTDWPDSVKG- | ARGLPVPPLGDIIH- | 3 |
| | | SYVMGWFRQAPGKEREFWVAITGTRRTTDW | | SEQ ID | SEQ ID | SEQ ID | |
| | | PDSVKGRFTISRDNAQNTVYLDMNSLKPED | | NO: 1161 | NO: 1162 | NO: 1163 | |
| | | TAVYYCASARGLPVPPLGDIIHWGEGTLVT | | | | | |
| | | VSS- | | | | | |
| | | SEQ ID | | | | | |
| | | NO: 232 | | | | | |
| 247 | 233 | QVQLVESGGGLVQAGGSLRLSCAASGRTFS | b122 | SDAKG- | AITWAGRGTDYADSVKG- | NPEGVIGPYFRNSNRYNY- | 19 |
| | | SDAKGWFRQAPGKEREFVAAITWAGRGTDY | | SEQ ID | SEQ ID | SEQ ID | |
| | | ADSVKGRFTITRDNAKNMVYLQMSNLKPED | | NO: 1164 | NO: 1165 | NO: 1166 | |
| | | TAVYYCALNPEGVIGPYFRNSNRYNYWGQG | | | | | |
| | | TQVTVSS- | | | | | |
| | | SEQ ID | | | | | |
| | | NO: 233 | | | | | |
| 248 | 234 | EVQLVESGGGLVQAGGSLRLSCVVSGDVFV | b38 | RYTMA- | AVTDSGRTTEYVDSVKG- | NTDYFQIRSVDNNA- | 21 |
| | | RYTMAWFRQAPGKEREFVAAVTDSGRTTEY | | SEQ ID | SEQ ID | SEQ ID | |
| | | VDSVKGRFTVSRDNAKNTVYLQMNNLKPED | | NO: 1167 | NO: 1168 | NO: 1169 | |
| | | TAVYYCAANTDYFQIRSVDNNAWGQGTQVT | | | | | |
| | | VSS- | | | | | |
| | | SEQ ID | | | | | |
| | | NO: 234 | | | | | |
| 250 | 235 | QVQLVESGGGLVQAGGSLRLACALSGDVFV | b96 | RYTMA- | SVTDSGRTTDYVASVQG- | NTDYFQIRSLDRNT- | 20 |
| | | RYTMAWFRQAPGKEREFVASVTDSGRTTDY | | SEQ ID | SEQ ID | SEQ ID | |
| | | VASVQGRFTVSRDNNKNTVYLQMNSLKPED | | NO: 1170 | NO: 1171 | NO: 1172 | |
| | | TAVYYCAANTDYFQIRSLDRNTWGQGTQVT | | | | | |
| | | VSS- | | | | | |
| | | SEQ ID | | | | | |
| | | NO: 235 | | | | | |
| 251 | 236 | EVQLVESGGGLVQAGGSLRLACALSGDVFV | b8 | RYTMA- | SVTDSGRTTDYVASVQG- | NTDYFQIRSLDRNT- | 20 |
| | | RYTMAWFRQAPGKEREFVASVTDSGRTTDY | | SEQ ID | SEQ ID | SEQ ID | |
| | | VASVQGRFTVSRDNNKNTVYLQMNSLKPED | | NO: 1173 | NO: 1174 | NO: 1175 | |
| | | TAVYYCAANTDYFQIRSLDRNTWGQGTQVT | | | | | |
| | | VSS- | | | | | |
| | | SEQ ID | | | | | |
| | | NO: 236 | | | | | |
| 253 | 237 | QVQLVESGGGLVQAGGSLRLSCAAAGRAIE | b98 | RYTMA- | AITWISGSTLYADSVKG- | ALKTITRGQNDYSY- | 1 |
| | | NYPVGWFRRAPGKEREFVAAITWISGSTLY | | SEQ ID | SEQ ID | SEQ ID | |
| | | ADSVKGRFTISRDNAKNTVYLQMSSLKPED | | NO: 1176 | NO: 1177 | NO: 1178 | |
| | | TALYYCAAALKTITRGQNDYSYWGQGTQVT | | | | | |
| | | VSS- | | | | | |
| | | SEQ ID | | | | | |
| | | NO: 237 | | | | | |
| 255 | 238 | QVQLVESGGGLVQAGGSLRLACALSGDVFV | b97 | RYTMA- | SVTDSGRTTDYVASVQG- | NTDYFQIRSLDRNT- | 20 |
| | | RYTMAWFRQAPGKGREFVASVTDSGRTTDY | | SEQ ID | SEQ ID | SEQ ID | |
| | | VASVQGRFTVSRDNNKNTVYLQMNSLKPED | | NO: 1179 | NO: 1180 | NO: 1181 | |
| | | TAVYYCAANTDYFQIRSLDRNTWGQGTQVT | | | | | |
| | | VSS- | | | | | |
| | | SEQ ID | | | | | |
| | | NO: 238 | | | | | |
| 257 | 239 | QVQLVESGGGLVQAGGSLRLACAASGRTFS | b95 | RYTMA- | GISPSGGYAWHADSVKG- | DHPPYGAVASRSEYEYDD- | 6 |
| | | TLTMGWFRQAPGKEREFVAGISPSGGYAWH | | SEQ ID | SEQ ID | SEQ ID | |
| | | ADSVKGRFTIDRDNAKNTVYLQTRSLRPED | | NO: 1182 | NO: 1183 | NO: 1184 | |
| | | TAVYYCAADHPPYGAVASRSEYEYDDWGPG | | | | | |
| | | TRVTVSS- | | | | | |
| | | SEQ ID | | | | | |
| | | NO: 239 | | | | | |
| 258 | 240 | QVQLVESGGGLVQAGGSLRLSCVVSGDVFV | b145 | RYTMA- | SITDSGRTTEYVDSVKG- | NTDYFRIRSLDANT- | 20 |
| | | RYTMAWFRQAPGKEREFVISITDSGRTTEY | | SEQ ID | SEQ ID | SEQ ID | |
| | | VDSVKGRFTVSRDNAKNTVYLQMNNLKPED | | NO: 1185 | NO: 1186 | NO: 1187 | |
| | | TAVYYCAANTDYFRIRSLDANTWGQGTQVT | | | | | |
| | | VSS- | | | | | |
| | | SEQ ID | | | | | |
| | | NO: 240 | | | | | |
| 260 | 241 | QVQLVESGGGLVQAGGSLRLSCAVSGDVFV | b132 | RYTMA- | SVTDSGRTTDYVHSVKG- | NTDYFQIKSLDANT- | 20 |
| | | RYTMAWFRQAPGKEREFVASVTDSGRTTDY | | SEQ ID | SEQ ID | SEQ ID | |
| | | VHSVKGRFTVSRDNAKNTVYLQMNNLKPED | | NO: 1188 | NO: 1189 | NO: 1190 | |
| | | TAVYYCAANTDYFQIKSLDANTWGQGTQVT | | | | | |
| | | VSS- | | | | | |
| | | SEQ ID | | | | | |
| | | NO: 241 | | | | | |
| 262 | 242 | EVQLVESGGGLVQAGGSLTLSCAASGRAFS | b43 | RYTMA- | AITWLSGSTLYADSVEG- | ALKTITRGQNDYSY- | 1 |
| | | NYPVGWFRQAPGKEREFVAAITWLSGSTLY | | SEQ ID | SEQ ID | SEQ ID | |
| | | ADSVEGRFTISRDNAKNTVYLLMSSLKPED | | NO: 1191 | NO: 1192 | NO: 1193 | |
| | | TALYFCAAALKTITRGQNDYSYWGQGTQVT | | | | | |
| | | VSS- | | | | | |
| | | SEQ ID | | | | | |
| | | NO: 242 | | | | | |
| 263 | 243 | QVQLVESGGGLVQAGGSLRLSCVVSGDVFV | b144 | RYTMA- | VVTDSGRTTEYVDSVKG- | NTDYFQIRSVDNNA- | 21 |
| | | RYTMAWFRQAPGKEREFVAVVTDSGRTTEY | | SEQ ID | SEQ ID | SEQ ID | |
| | | VDSVKGRFTVSRDNAKNTVYLQMNNLKPED | | NO: 1194 | NO: 1195 | NO: 1196 | |
| | | TAVYYCAANTDYFQIRSVDNNAWGQGTQVT | | | | | |
| | | VSS- | | | | | |
| | | SEQ ID | | | | | |
| | | NO: 243 | | | | | |
| 264 | 244 | QVQLVESGGGLVQAGGSLRLSCAASGSIFS | b127 | RYTMA- | AISRSGGSTAYVDSVKG- | TAAVGWTSRWITTDFDS- | 30 |
| | | INAMGWFRQAPGKEREFVAAISRSGGSTAY | | SEQ ID | SEQ ID | SEQ ID | |
| | | VDSVKGRFTISRDNSKNMVHLQMNSLKSED | | NO: 1197 | NO: 1198 | NO: 1199 | |
| | | EAVYYCAATAAVGWTSRWITTDFDSWGQGT | | | | | |
| | | QVTVSS- | | | | | |
| | | SEQ ID | | | | | |
| | | NO: 244 | | | | | |
| 265 | 245 | QVQLVESGGGLVQAGGSLRLACALSGDVFV | b96 | RYTMA- | SVTDSGRTTDYVASVQG- | NTDYFQIRSLDRNT- | 20 |
| | | RYTMAWFRQAPGKEREFVASVTDSGRTTDY | | SEQ ID | SEQ ID | SEQ ID | |
| | | VASVQGRFTVSRDNNKNTVYLQMNSLKPED | | NO: 1200 | NO: 1201 | NO: 1202 | |
| | | TAVYYCAANTDYFQIRSLDRNTWGQGTQVT | | | | | |
| | | VSS- | | | | | |
| | | SEQ ID | | | | | |
| | | NO: 245 | | | | | |
| 266 | 246 | QVQLVESGGGLVQAGGSLRLSCVVSGDVFV | b144 | RYTMA- | VVTDSGRTTEYVDSVKG- | NTDYFQIRSVDNNA- | 21 |
| | | RYTMAWFRQAPGKEREFVAVVTDSGRTTEY | | SEQ ID | SEQ ID | SEQ ID | |
| | | VDSVKGRFTVSRDNAKNTVYLQMNNLKPED | | NO: 1203 | NO: 1204 | NO: 1205 | |
| | | TAVYYCAANTDYFQIRSVDNNAWGQGTQVT | | | | | |
| | | VSS- | | | | | |
| | | SEQ ID | | | | | |
| | | NO: 246 | | | | | |
| 267 | 247 | QVQLVESGGGLVQAGGSLRLSCAASGRTFS | b126 | RYTMA- | AITWTGRGTMYAESVEG- | ARRGRAAVRSEGGYDF- | 4 |
| | | TTEMGWFRQAPGKEREFVAAITWTGRGTMY | | SEQ ID | SEQ ID | SEQ ID | |
| | | AESVEGRFTISRENAKNMVYLQMNSLKPED | | NO: 1206 | NO: 1207 | NO: 1208 | |
| | | TAIYYCAAARRGRAAVRSEGGYDFWGQGTQ | | | | | |
| | | VTVSS- | | | | | |
| | | SEQ ID | | | | | |
| | | NO: 247 | | | | | |
| 268 | 248 | QVQLQESGGGLVQAGDSLRLSCVVSGRDFS | b73 | RYTMA- | LITWSTGRVHYTDSVEG- | GRVGYTTNLHSYDY- | 16 |
| | | GYTMGWFRQPPGKEREFVALITWSTGRVHY | | SEQ ID | SEQ ID | SEQ ID | |
| | | TDSVEGRFTISRDSAKNTVYLQMNSLKPED | | NO: 1209 | NO: 1210 | NO: 1211 | |
| | | TAVYTCAAGRVGYTTNLHSYDYSGQGTQVI | | | | | |
| | | VSA- | | | | | |
| | | SEQ ID | | | | | |
| | | NO: 248 | | | | | |
| 269 | 249 | EVQLVESGGGLVQPGGSLRLSCAASGFTFR | b48 | RYTMA- | GITGEGLGTIYQDSVEG- | MASGTLFRDKPYEYTS- | 17 |
| | | NYAMSWVRQAPGKGLEWVGGITGEGLGTIY | | SEQ ID | SEQ ID | SEQ ID | |
| | | QDSVEGRFTISRNNAKNTLYLQMNSLRSED | | NO: 1212 | NO: 1213 | NO: 1214 | |
| | | TAVYYCTKMASGTLFRDKPYEYTSRGQGTQ | | | | | |
| | | VTVSS- | | | | | |
| | | SEQ ID | | | | | |
| | | NO: 249 | | | | | |
| 271 | 250 | QVQLVESGGGLVQAGGSLRLSCAASGRSYA | b117 | RYTMA- | AISWSASSTYYSESVKG- | RASPFVAGSYDPSDDPADYGS- | 23 |
| | | MGWFRQAPGKEREFVAAISWSASSTYYSES | | SEQ ID | SEQ ID | SEQ ID | |
| | | VKGRFTISRENAKNTVYLQMNSLKPEDTAV | | NO: 1215 | NO: 1216 | NO: 1217 | |
| | | YYCAVRASPFVAGSYDPSDDPADYGSWGQG | | | | | |
| | | TQVIVSS- | | | | | |
| | | SEQ ID | | | | | |
| | | NO: 250 | | | | | |
| 272 | 251 | QVQLVESGGGLVQAGGSLRLSCAASGRTFS | b126 | RYTMA- | AITWTGRGTMYAESVEG- | ARRGRAAVRSEGGYDF- | 4 |
| | | TTEMGWFRQAPGKEREFVAAITWTGRGTMY | | SEQ ID | SEQ ID | SEQ ID | |
| | | AESVEGRFTISRENAKNMVYLQMNSLKPED | | NO: 1218 | NO: 1219 | NO: 1220 | |
| | | TAIYYCAAARRGRAAVRSEGGYDFWGQGTQ | | | | | |
| | | VTVSS- | | | | | |
| | | SEQ ID | | | | | |
| | | NO: 251 | | | | | |
| 274 | 252 | EVQLVESGGGLVQAGGSLRLACALSGDVFV | b8 | RYTMA- | SVTDSGRTTDYVASVQG- | NTDYFQIRSLDRNT- | 20 |
| | | RYTMAWFRQAPGKEREFVASVTDSGRTTDY | | SEQ ID | SEQ ID | SEQ ID | |
| | | VASVQGRFTVSRDNNKNTVYLQMNSLKPED | | NO: 1221 | NO: 1222 | NO: 1223 | |
| | | TAVYYCAANTDYFQIRSLDRNTWGQGTQVT | | | | | |
| | | VSS- | | | | | |
| | | SEQ ID | | | | | |
| | | NO: 252 | | | | | |
| 275 | 253 | QVQLVESGGGLVQAGGSLRLACALSGDVFV | b96 | RYTMA- | SVTDSGRTTDYVASVQG- | NTDYFQIRSLDRNT- | 20 |
| | | RYTMAWFRQAPGKEREFVASVTDSGRTTDY | | SEQ ID | SEQ ID | SEQ ID | |
| | | VASVQGRFTVSRDNNKNTVYLQMNSLKPED | | NO: 1224 | NO: 1225 | NO: 1226 | |
| | | TAVYYCAANTDYFQIRSLDRNTWGQGTQVT | | | | | |
| | | VSS- | | | | | |
| | | SEQ ID | | | | | |
| | | NO: 253 | | | | | |
| 276 | 254 | QVQLVESGGGLVQAGGSLRLSCAASGRTFS | b125 | RYTMA- | AITWSSHSTLYADSVEG- | VRRGWAVVRTEGAYDF- | 35 |
| | | TTDVGWFRQAPGKEREFVAAITWSSHSTLY | | SEQ ID | SEQ ID | SEQ ID | |
| | | ADSVEGRFTVTRENAKNTVYLQMNSLKPED | | NO: 1227 | NO: 1228 | NO: 1229 | |
| | | TAVYYCAAVRRGWAVVRTEGAYDFWGQGTQ | | | | | |
| | | VTVSA- | | | | | |
| | | SEQ ID | | | | | |
| | | NO: 254 | | | | | |
| 277 | 255 | EVQLVESGGGLVQAGGSLRLSCVVSGDVFV | b37 | RYTMA- | AVTDSGRTTEYVDSVKG- | NTDYFQIRSVDNNA- | 21 |
| | | RYTMAWFRQAPGKEREFVAAVTDSGRTTEY | | SEQ ID | SEQ ID | SEQ ID | |
| | | VDSVKGRFTVSRDNAKNTVYLQMNNLEPED | | NO: 1230 | NO: 1231 | NO: 1232 | |
| | | TAVYYCAANTDYFQIRSVDNNAWGQGTQVT | | | | | |
| | | VSS- | | | | | |
| | | SEQ ID | | | | | |
| | | NO: 255 | | | | | |
| 278 | 256 | QVQLVESGGGLAQAGGSLRLSCAASGRTFS | b87 | RYTMA- | AITWSGRDTDYADSVKG- | YPQGTIGPYFRSSNHYDY- | 37 |
| | | QDAKAWFRQAPGKEREFVAAITWSGRDTDY | | SEQ ID | SEQ ID | SEQ ID | |
| | | ADSVKGRFTIARDNAKNTVYLQMDSLKPED | | NO: 1233 | NO: 1234 | NO: 1235 | |
| | | TAVYYCAVYPQGTIGPYFRSSNHYDYWGQG | | | | | |
| | | TQVTVSS- | | | | | |
| | | SEQ ID | | | | | |
| | | NO: 256 | | | | | |
| 279 | 257 | EVQLVESGGGLVQAGGSLRLSCAASGDVFV | b14 | RYTMA- | SVTDSGRTTDYVDSVKG- | NTDYFQIRSLEFNT- | 20 |
| | | RYTMAWFRQAPGKEREFVASVTDSGRTTDY | | SEQ ID | SEQ ID | SEQ ID | |
| | | VDSVKGRFTVSRDNAKNTVYLQMNNLKPED | | NO: 1236 | NO: 1237 | NO: 1238 | |
| | | TAVYYCAANTDYFQIRSLEFNTWGQGTQVT | | | | | |
| | | VSS- | | | | | |
| | | SEQ ID | | | | | |
| | | NO: 257 | | | | | |
| 282 | 258 | EVQLVESGGGLVQAGGSLRLSCAASGDVFV | b10 | RYTMA- | AVTDSGRTADYVDSVKG- | NTDYFQIRSLDRNT- | 20 |
| | | RYTMAWFRQAPGKEREFVAAVTDSGRTADY | | SEQ ID | SEQ ID | SEQ ID | |
| | | VDSVKGRFTVSRDNAKNTVYLQMNNLKPED | | NO: 1239 | NO: 1240 | NO: 1241 | |
| | | TAVYYCAANTDYFQIRSLDRNTWGQGTQVT | | | | | |
| | | VSS- | | | | | |
| | | SEQ ID | | | | | |
| | | NO: 258 | | | | | |
| 283 | 259 | QVQLVESGGGLVQAGGSLRLSCAASGRAFS | b116 | RYTMA- | IISESGGIIDYGDSVKG- | ARDWFARTAYQYDY- | 2 |
| | | TYSMGWFRQTPGKEREFVAIISESGGIIDY | | SEQ ID | SEQ ID | SEQ ID | |
| | | GDSVKGRFTLSRDNAKNTVSLQMSSLQPED | | NO: 1242 | NO: 1243 | NO: 1244 | |
| | | TAVYYCAAARDWFARTAYQYDYWGQGTQVT | | | | | |
| | | VSA- | | | | | |
| | | SEQ ID | | | | | |
| | | NO: 259 | | | | | |
| 481 | 260 | QVQLVESGGGLVQAGGSLRLACALSGDVFV | b96 | RYTMA- | SVTDSGRTTDYVASVQG- | NTDYFQIRSLDRNT- | 20 |
| | | RYTMAWFRQAPGKEREFVASVTDSGRTTDY | | SEQ ID | SEQ ID | SEQ ID | |
| | | VASVQGRFTVSRDNNKNTVYLQMNSLKPED | | NO: 1245 | NO: 1246 | NO: 1247 | |
| | | TAVYYCAANTDYFQIRSLDRNTWGQGTQVT | | | | | |
| | | VSS- | | | | | |
| | | SEQ ID | | | | | |
| | | NO: 260 | | | | | |
| 482 | 261 | QVQLVESGGGLVQAGGSLRLSCAASGDVFV | b103 | RYTMA- | SVTDSGRTTDYVHSVKG- | NTDYFQIRSLDANT- | 20 |
| | | RYTMAWFRQAPGKEREFVASVTDSGRTTDY | | SEQ ID | SEQ ID | SEQ ID | |
| | | VHSVKGRFTVSRDNAKNTVYLQMNNLKPED | | NO: 1248 | NO: 1249 | NO: 1250 | |
| | | TAVYYCAANTDYFQIRSLDANTWGQGTQVT | | | | | |
| | | VSS- | | | | | |
| | | SEQ ID | | | | | |
| | | NO: 261 | | | | | |
| 483 | 262 | QVQLVESGGGLVQAGGSLRLSCAASGDVFV | b100 | RYTMA- | SVTDSGRTTDYVDSVKG- | NTDYFQIKSLDLNT- | 20 |
| | | RYTMAWFRQAPGKEREFVASVTDSGRTTDY | | SEQ ID | SEQ ID | SEQ ID | |
| | | VDSVKGRFTVSRDNAKNTVYLQMNALKPED | | NO: 1251 | NO: 1252 | NO: 1253 | |
| | | TAVYYCAANTDYFQIKSLDLNTWGQGTQVT | | | | | |
| | | VSS- | | | | | |
| | | SEQ ID | | | | | |
| | | NO: 262 | | | | | |
| 484 | 263 | QVQLVESGGRLVQAGGSLRLSCAASGDVFV | b178 | RYTMA- | SVTDSGRTTEYVDSVKG- | NTDYFQIRSLNLNT- | 20 |
| | | RYTMAWFRQAPGKEREFVASVTDSGRTTEY | | SEQ ID | SEQ ID | SEQ ID | |
| | | VDSVKGRFTVSRDNAKNTAYLQMNNLKPED | | NO: 1254 | NO: 1255 | NO: 1256 | |
| | | TAVYYCAANTDYFQIRSLNLNTWGQGTQVT | | | | | |
| | | VSS- | | | | | |
| | | SEQ ID | | | | | |
| | | NO: 263 | | | | | |
| 487 | 264 | EVQLVESGGGLVQAGDSLRLSCVVSGRGFS | b4 | RYTMA- | AITWSTGRTSYADSVKG- | DQVLWTTRPRDMRY- | 7 |
| | | TYTMGWFRQAPGKEREFVAAITWSTGRTSY | | SEQ ID | SEQ ID | SEQ ID | |
| | | ADSVKGRFTISRENAENTVYLQMNSLELED | | NO: 1257 | NO: 1258 | NO: 1259 | |
| | | TAVYYCATDQVLWTTRPRDMRYWGQGTQVT | | | | | |
| | | VSF- | | | | | |
| | | SEQ ID | | | | | |
| | | NO: 264 | | | | | |
| 488 | 265 | EVQLVESGGGLVQAGGSLRLSCAVSGDVFV | b33 | RYTMA- | SVTDSGRTTDYVHSVKG- | NTDYFQIKSLDANT- | 20 |
| | | RYTMAWFRQAPGKEREFVASVTDSGRTTDY | | SEQ ID | SEQ ID | SEQ ID | |
| | | VHSVKGRFTVSRDNAKNTVYLQMNNLKPED | | NO: 1260 | NO: 1261 | NO: 1262 | |
| | | TAVYYCAANTDYFQIKSLDANTWGQGTQVT | | | | | |
| | | VSS- | | | | | |
| | | SEQ ID | | | | | |
| | | NO: 265 | | | | | |
| 490 | 266 | QVQLVESGGGLVQAGGSLRLSCVVSGDVFV | b143 | RYTMA- | AVTDSGRTTEYVDSVKG- | NTDYFQIRSVDNNA- | 21 |
| | | RYTMAWFRQAPGKEREFVAAVTDSGRTTEY | | SEQ ID | SEQ ID | SEQ ID | |
| | | VDSVKGRFTVSRDNAKNTVYLQMNNLKPED | | NO: 1263 | NO: 1264 | NO: 1265 | |
| | | TAVYYCAANTDYFQIRSVDNNAWGQGTQVT | | | | | |
| | | VSS- | | | | | |
| | | SEQ ID | | | | | |
| | | NO: 266 | | | | | |
| 491 | 267 | QVQLVESGGGLVQAGGSLRLSCVVSGDVFV | b144 | RYTMA- | VVTDSGRTTEYVDSVKG- | NTDYFQIRSVDNNA- | 21 |
| | | RYTMAWFRQAPGKEREFVAVVTDSGRTTEY | | SEQ ID | SEQ ID | SEQ ID | |
| | | VDSVKGRFTVSRDNAKNTVYLQMNNLKPED | | NO: 1266 | NO: 1267 | NO: 1268 | |
| | | TAVYYCAANTDYFQIRSVDNNAWGQGTQVT | | | | | |
| | | VSS- | | | | | |
| | | SEQ ID | | | | | |
| | | NO: 267 | | | | | |
| 493 | 268 | QVQLVESGGGLVQAGGSLRLSCAVSGDVFV | b137 | RYTMA- | TVTDSGRTTEYVDSVKG- | NTDYFRIRSLDANT- | 20 |
| | | RYTMAWFRQAPGKEREFVATVTDSGRTTEY | | SEQ ID | SEQ ID | SEQ ID | |
| | | VDSVKGRFTVSRDNAKNTVYLQMNNLKPED | | NO: 1269 | NO: 1270 | NO: 1271 | |
| | | TAVYYCAANTDYFRIRSLDANTWGQGTQVT | | | | | |
| | | VSS- | | | | | |
| | | SEQ ID | | | | | |
| | | NO: 268 | | | | | |
| 494 | 269 | QVQLQESGGGLVQAGGSLRLSCAASGDVFV | b74 | RYTMA- | SVTDSGRTTDYVDSVKG- | NTDYFQIKSLDLNT- | 20 |
| | | RYTMAWFRQAPGKEREFVASVTDSGRTTDY | | SEQ ID | SEQ ID | SEQ ID | |
| | | VDSVKGRFTVSRDNAKNTVYLQMNALKPED | | NO: 1272 | NO: 1273 | NO: 1274 | |
| | | TAVYYCAANTDYFQIKSLDLNTWGQGTQVT | | | | | |
| | | VSS- | | | | | |
| | | SEQ ID | | | | | |
| | | NO: 269 | | | | | |
| 495 | 270 | EVQLVESGGGLVQAGGSLRLSCVVSGDVFV | b42 | RYTMA- | VVTDSGRTTEYVDSVKG- | NTDYFQIRSVDNNA- | 21 |
| | | RYTMAWFRQAPRKEREFVAVVTDSGRTTEY | | SEQ ID | SEQ ID | SEQ ID | |
| | | VDSVKGRFTVSRDNAKNTVYLQMNNLKPED | | NO: 1275 | NO: 1276 | NO: 1277 | |
| | | TAVYYCAANTDYFQIRSVDNNAWGQGTQVT | | | | | |
| | | VSS- | | | | | |
| | | SEQ ID | | | | | |
| | | NO: 270 | | | | | |
| 496 | 271 | QVQLVESGGGLVQAGGSLRLSCAVSGDVFV | b135 | RYTMA- | SVTDSGRTTEYVDSVKG- | NTDYFQIRSLDLNT- | 20 |
| | | RYTMAWFRQAPGKEREFVASVTDSGRTTEY | | SEQ ID | SEQ ID | SEQ ID | |
| | | VDSVKGRFTVSRDNAKNTAYLQMNNLKPED | | NO: 1278 | NO: 1279 | NO: 1280 | |
| | | TAVYYCAANTDYFQIRSLDLNTWGQGTQVT | | | | | |
| | | VSS- | | | | | |
| | | SEQ ID | | | | | |
| | | NO: 271 | | | | | |
| 497 | 272 | EVQLVESGGGLVQAGGSLRLSCAASGDVFV | b14 | RYTMA- | SVTDSGRTTDYVDSVKG- | NTDYFQIRSLEFNT- | 20 |
| | | RYTMAWFRQAPGKEREFVASVTDSGRTTDY | | SEQ ID | SEQ ID | SEQ ID | |
| | | VDSVKGRFTVSRDNAKNTVYLQMNNLKPED | | NO: 1281 | NO: 1282 | NO: 1283 | |
| | | TAVYYCAANTDYFQIRSLEFNTWGQGTQVT | | | | | |
| | | VSS- | | | | | |
| | | SEQ ID | | | | | |
| | | NO: 272 | | | | | |
| 500 | 273 | QVQLVESGGGLVQAGGSLRLSCAASGDVFV | b104 | RYTMA- | SVTDSGRTTEYVDSVKG- | NTDYFQIRSLDLNT- | 20 |
| | | RYTMAWFRQAPGKEREFVASVTDSGRTTEY | | SEQ ID | SEQ ID | SEQ ID | |
| | | VDSVKGRFTVSRDNAKNTAYLQMNNLKPED | | NO: 1284 | NO: 1285 | NO: 1286 | |
| | | TAIYYCAANTDYFQIRSLDLNTWGQGTQVT | | | | | |
| | | VSS- | | | | | |
| | | SEQ ID | | | | | |
| | | NO: 273 | | | | | |
| 501 | 274 | EVQLVESGGGLVQAGGSLRLSCAASGDVFV | b12 | RYTMA- | SVTDSGRTTDYVDSVKG- | NTDYFQIKSLDRNT- | 20 |
| | | RYTMAWFRQAPGKEREFVASVTDSGRTTDY | | SEQ ID | SEQ ID | SEQ ID | |
| | | VDSVKGRFTVSRDNAKNTVYLQMNNLKPED | | NO: 1287 | NO: 1288 | NO: 1289 | |
| | | TAVYYCAANTDYFQIKSLDRNTWGQGTQVT | | | | | |
| | | VSP- | | | | | |
| | | SEQ ID | | | | | |
| | | NO: 274 | | | | | |
| 503 | 275 | QVQLVESGGGLVQAGGSLRLSCVVSGDVFV | b144 | RYTMA- | VVTDSGRTTEYVDSVKG- | NTDYFQIRSVDNNA- | 21 |
| | | RYTMAWFRQAPGKEREFVAVVTDSGRTTEY | | SEQ ID | SEQ ID | SEQ ID | |
| | | VDSVKGRFTVSRDNAKNTVYLQMNNLKPED | | NO: 1290 | NO: 1291 | NO: 1292 | |
| | | TAVYYCAANTDYFQIRSVDNNAWGQGTQVT | | | | | |
| | | VSS- | | | | | |
| | | SEQ ID | | | | | |
| | | NO: 275 | | | | | |
| 504 | 276 | QVQLVESGGGLVQAGGSLRLSCAVSGDVFV | b135 | RYTMA- | SVTDSGRTTEYVDSVKG- | NTDYFQIRSLDLNT- | 20 |
| | | RYTMAWFRQAPGKEREFVASVTDSGRTTEY | | SEQ ID | SEQ ID | SEQ ID | |
| | | VDSVKGRFTVSRDNAKNTAYLQMNNLKPED | | NO: 1293 | NO: 1294 | NO: 1295 | |
| | | TAVYYCAANTDYFQIRSLDLNTWGQGTQVT | | | | | |
| | | VSS- | | | | | |
| | | SEQ ID | | | | | |
| | | NO: 276 | | | | | |
| 506 | 277 | QVQLVESGGGLVQAGGSLRLSCAVSGDVFV | b135 | RYTMA- | SVTDSGRTTEYVDSVKG- | NTDYFQIRSLDLNT- | 20 |
| | | RYTMAWFRQAPGKEREFVASVTDSGRTTEY | | SEQ ID | SEQ ID | SEQ ID | |
| | | VDSVKGRFTVSRDNAKNTAYLQMNNLKPED | | NO: 1296 | NO: 1297 | NO: 1298 | |
| | | TAVYYCAANTDYFQIRSLDLNTWGQGTQVT | | | | | |
| | | VSS- | | | | | |
| | | SEQ ID | | | | | |
| | | NO: 277 | | | | | |
| 507 | 278 | QVQLQESGGGLVQAGGSLRLSCAASGDVFV | b75 | RYTMA- | SVTDSGRTTDYVDSVKG- | NTDYFQIRSLEFNT- | 20 |
| | | RYTMAWFRQAPGKEREFVASVTDSGRTTDY | | SEQ ID | SEQ ID | SEQ ID | |
| | | VDSVKGRFTVSRDNAKNTVYLQMNNLKPED | | NO: 1299 | NO: 1300 | NO: 1301 | |
| | | TAVYYCAANTDYFQIRSLEFNTWGQGTQVT | | | | | |
| | | VSS- | | | | | |
| | | SEQ ID | | | | | |
| | | NO: 278 | | | | | |
| 508 | 279 | QVQLQESGGGLVQAGGSLRLSCVVSGDVFV | b82 | RYTMA- | VVTDSGRTTEYVDSVKG- | NTDYFQIRSVDNNA- | 21 |
| | | RYTMAWFRQAPGKEREFVAVVTDSGRTTEY | | SEQ ID | SEQ ID | SEQ ID | |
| | | VDSVKGRFTVSRDNAKNTVYLQMNNLKPED | | NO: 1302 | NO: 1303 | NO: 1304 | |
| | | TAVYYCAANTDYFQIRSVDNNAWGQGTQVT | | | | | |
| | | VSS- | | | | | |
| | | SEQ ID | | | | | |
| | | NO: 279 | | | | | |
| 509 | 280 | QVQLVESGGGLVQAGGSLRLSCAVSGDVFV | b135 | RYTMA- | SVTDSGRTTEYVDSVKG- | NTDYFQIRSLDLNT- | 20 |
| | | RYTMAWFRQAPGKEREFVASVTDSGRTTEY | | SEQ ID | SEQ ID | SEQ ID | |
| | | VDSVKGRFTVSRDNAKNTAYLQMNNLKPED | | NO: 1305 | NO: 1306 | NO: 1307 | |
| | | TAVYYCAANTDYFQIRSLDLNTWGQGTQVT | | | | | |
| | | VSS- | | | | | |
| | | SEQ ID | | | | | |
| | | NO: 280 | | | | | |
| 510 | 281 | QVQLVESGGGLVQAGGSLRLSCAVSGDVFV | b136 | RYTMA- | SVTDSGRTTEYVDSVKG- | NTDYFQIRSLRANT- | 20 |
| | | RYTMAWFRQAPGKEREFVASVTDSGRTTEY | | SEQ ID | SEQ ID | SEQ ID | |
| | | VDSVKGRFTVSRDNAKNTVYLQMNSLKPED | | NO: 1308 | NO: 1309 | NO: 1310 | |
| | | TAVYYCAANTDYFQIRSLRANTWGQGTQVT | | | | | |
| | | VSS- | | | | | |
| | | SEQ ID | | | | | |
| | | NO: 281 | | | | | |
| 511 | 282 | QVQLQESGGGLVQAGGSLRLSCVVSGDVFV | b82 | RYTMA- | VVTDSGRTTEYVDSVKG- | NTDYFQIRSVDNNA- | 21 |
| | | RYTMAWFRQAPGKEREFVAVVTDSGRTTEY | | SEQ ID | SEQ ID | SEQ ID | |
| | | VDSVKGRFTVSRDNAKNTVYLQMNNLKPED | | NO: 1311 | NO: 1312 | NO: 1313 | |
| | | TAVYYCAANTDYFQIRSVDNNAWGQGTQVT | | | | | |
| | | VSS- | | | | | |
| | | SEQ ID | | | | | |
| | | NO: 282 | | | | | |
| 512 | 283 | EVQLVESGGGLVQAGGSLRLSCAVSGDVFV | b34 | RYTMA- | SVTDSGRTTEYVDSVKG- | NTDYFQIRSLDLNT- | 20 |
| | | RYTMAWFRQAPGKEREFVASVTDSGRTTEY | | SEQ ID | SEQ ID | SEQ ID | |
| | | VDSVKGRFTVSRDNAKNTAYLQMNNLKPED | | NO: 1314 | NO: 1315 | NO: 1316 | |
| | | TAVYYCAANTDYFQIRSLDLNTWGQGTQVT | | | | | |
| | | VSS- | | | | | |
| | | SEQ ID | | | | | |
| | | NO: 283 | | | | | |
| 513 | 284 | QVQLVESGGGLVQAGGSLRLSCAVSGDVFV | b132 | RYTMA- | SVTDSGRTTDYVHSVKG- | NTDYFQIKSLDANT- | 20 |
| | | RYTMAWFRQAPGKEREFVASVTDSGRTTDY | | SEQ ID | SEQ ID | SEQ ID | |
| | | VHSVKGRFTVSRDNAKNTVYLQMNNLKPED | | NO: 1317 | NO: 1318 | NO: 1319 | |
| | | TAVYYCAANTDYFQIKSLDANTWGQGTQVT | | | | | |
| | | VSS- | | | | | |
| | | SEQ ID | | | | | |
| | | NO: 284 | | | | | |
| 514 | 285 | QVQLVESGGGLVQAGGSLRLSCAASGDVFV | b102 | RYTMA- | SVTDSGRTTDYVDSVKG- | NTDYFQIRSLEFNT- | 20 |
| | | RYTMAWFRQAPGKEREFVASVTDSGRTTDY | | SEQ ID | SEQ ID | SEQ ID | |
| | | VDSVKGRFTVSRDNAKNTVYLQMNNLKPED | | NO: 1320 | NO: 1321 | NO: 1322 | |
| | | TAVYYCAANTDYFQIRSLEFNTWGQGTQVT | | | | | |
| | | VSS- | | | | | |
| | | SEQ ID | | | | | |
| | | NO: 285 | | | | | |
| 515 | 286 | EVQLVESGGGLVQAGGSLRLSCVVSGDVFV | b41 | RYTMA- | VVTDSGRTTEYVDSVKG- | NTDYFQIRSVDNNA- | 21 |
| | | RYTMAWFRQAPGKGREFVAVVTDSGRTTEY | | SEQ ID | SEQ ID | SEQ ID | |
| | | VDSVKGRFTVSRDNAKNTVYLQMNNLKPED | | NO: 1323 | NO: 1324 | NO: 1325 | |
| | | TAVYYCAANTDYFQIRSVDNNAWGQGTQVT | | | | | |
| | | VSS- | | | | | |
| | | SEQ ID | | | | | |
| | | NO: 286 | | | | | |
| 516 | 287 | QVQLVESGGGLVQAGGSLRLSCAVSGDVFV | b136 | RYTMA- | SVTDSGRTTEYVDSVKG- | NTDYFQIRSLRANT- | 20 |
| | | RYTMAWFRQAPGKEREFVASVTDSGRTTEY | | SEQ ID | SEQ ID | SEQ ID | |
| | | VDSVKGRFTVSRDNAKNTVYLQMNSLKPED | | NO: 1326 | NO: 1327 | NO: 1328 | |
| | | TAVYYCAANTDYFQIRSLRANTWGQGTQVT | | | | | |
| | | VSS- | | | | | |
| | | SEQ ID | | | | | |
| | | NO: 287 | | | | | |
| 520 | 288 | QVQLVESGGRLVQAGGSLRLSCVVSGDVFV | b179 | RYTMA- | VVTDSGRTTEYVGSVKG- | NTDYFQIRSVDNNA- | 21 |
| | | RYTMAWFRQAPGKEREFVAVVTDSGRTTEY | | SEQ ID | SEQ ID | SEQ ID | |
| | | VGSVKGRFTVSRDNAKNTVYLQMNNLKPED | | NO: 1329 | NO: 1330 | NO: 1331 | |
| | | TAVYYCAANTDYFQIRSVDNNAWGQGTQVT | | | | | |
| | | VSS- | | | | | |
| | | SEQ ID | | | | | |
| | | NO: 288 | | | | | |
| 521 | 289 | QLQLVESGGGLVQAGGSLRLACALSGDVFV | b66 | RYTMA- | SVTDSGRTTDYVASVQG- | NTDYFQIRSLDRNT- | 20 |
| | | RYTMAWFRQAPGKEREFVASVTDSGRTTDY | | SEQ ID | SEQ ID | SEQ ID | |
| | | VASVQGRFTVSRDNNKNTVYLQMNSLKPED | | NO: 1332 | NO: 1333 | NO: 1334 | |
| | | TAVYYCAANTDYFQIRSLDRNTWGQGTQVT | | | | | |
| | | VSS- | | | | | |
| | | SEQ ID | | | | | |
| | | NO: 289 | | | | | |
| 522 | 290 | EVQLVESGGGLVQAGGPLRLSCAVSGDVFV | b6 | RYTMA- | SVTDSGRTTEYVDSVKG- | NTDYFQIRSLDLNT- | 20 |
| | | RYTMAWFRQAPGKEREFVASVTDSGRTTEY | | SEQ ID | SEQ ID | SEQ ID | |
| | | VDSVKGRFTVSRDNAKNTAYLQMNNLKPED | | NO: 1335 | NO: 1336 | NO: 1337 | |
| | | TAVYYCAANTDYFQIRSLDLNTWGQGTQVT | | | | | |
| | | VSS- | | | | | |
| | | SEQ ID | | | | | |
| | | NO: 290 | | | | | |
| 523 | 291 | QVQLQESGGGLVQAGGSLRLSCVVSGDVFV | b82 | RYTMA- | VVTDSGRTTEYVDSVKG- | NTDYFQIRSVDNNA- | 21 |
| | | RYTMAWFRQAPGKEREFVAVVTDSGRTTEY | | SEQ ID | SEQ ID | SEQ ID | |
| | | VDSVKGRFTVSRDNAKNTVYLQMNNLKPED | | NO: 1338 | NO: 1339 | NO: 1340 | |
| | | TAVYYCAANTDYFQIRSVDNNAWGQGTQVT | | | | | |
| | | VSS- | | | | | |
| | | SEQ ID | | | | | |
| | | NO: 291 | | | | | |
| 524 | 292 | EVQLVESGGGLVQAGGSLRLSCAVSGDVFV | b34 | RYTMA- | SVTDSGRTTEYVDSVKG- | NTDYFQIRSLDLNT- | 20 |
| | | RYTMAWFRQAPGKEREFVASVTDSGRTTEY | | SEQ ID | SEQ ID | SEQ ID | |
| | | VDSVKGRFTVSRDNAKNTAYLQMNNLKPED | | NO: 1341 | NO: 1342 | NO: 1343 | |
| | | TAVYYCAANTDYFQIRSLDLNTWGQGTQVT | | | | | |
| | | VSS- | | | | | |
| | | SEQ ID | | | | | |
| | | NO: 292 | | | | | |
| 525 | 293 | EVQLVESGGGLVQAGGSLRLFCAVSGDVFV | b9 | RYTMA- | SVTDSGRTTEYVDSVKG- | NTDYFQIRSLDLNT- | 20 |
| | | RYTMAWFRQAPGKEREFVASVTDSGRTTEY | | SEQ ID | SEQ ID | SEQ ID | |
| | | VDSVKGRFTVSRDNAKDTAYLQMNNLKPED | | NO: 1344 | NO: 1345 | NO: 1346 | |
| | | TAVYYCAANTDYFQIRSLDLNTWGQGTQVT | | | | | |
| | | VSS- | | | | | |
| | | SEQ ID | | | | | |
| | | NO: 293 | | | | | |
| 526 | 294 | QVQLVESGGGLVQAGGSLRLSCAASGDVFV | b102 | RYTMA- | SVTDSGRTTDYVDSVKG- | NTDYFQIRSLEFNT- | 20 |
| | | RYTMAWFRQAPGKEREFVASVTDSGRTTDY | | SEQ ID | SEQ ID | SEQ ID | |
| | | VDSVKGRFTVSRDNAKNTVYLQMNNLKPED | | NO: 1347 | NO: 1348 | NO: 1349 | |
| | | TAVYYCAANTDYFQIRSLEFNTWGQGTQVT | | | | | |
| | | VSS- | | | | | |
| | | SEQ ID | | | | | |
| | | NO: 294 | | | | | |
| 530 | 295 | EVQLVESGGGLVQAGGSLRLSCAVSGDVFV | b34 | RYTMA- | SVTDSGRTTEYVDSVKG- | NTDYFQIRSLDLNT- | 20 |
| | | RYTMAWFRQAPGKEREFVASVTDSGRTTEY | | SEQ ID | SEQ ID | SEQ ID | |
| | | VDSVKGRFTVSRDNAKNTAYLQMNNLKPED | | NO: 1350 | NO: 1351 | NO: 1352 | |
| | | TAVYYCAANTDYFQIRSLDLNTWGQGTQVT | | | | | |
| | | VSS- | | | | | |
| | | SEQ ID | | | | | |
| | | NO: 295 | | | | | |
| 532 | 296 | QVQLVESGGGLVQAGGSLRLSCAASGDVFV | b104 | RYTMA- | SVTDSGRTTEYVDSVKG- | NTDYFQIRSLDLNT- | 20 |
| | | RYTMAWFRQAPGKEREFVASVTDSGRTTEY | | SEQ ID | SEQ ID | SEQ ID | |
| | | VDSVKGRFTVSRDNAKNTAYLQMNNLKPED | | NO: 1353 | NO: 1354 | NO: 1355 | |
| | | TAIYYCAANTDYFQIRSLDLNTWGQGTQVT | | | | | |
| | | VSS- | | | | | |
| | | SEQ ID | | | | | |
| | | NO: 296 | | | | | |
| 537 | 297 | EVQLVESGGGLVQAGESLRLSCAASGQYFS | b5 | RYTMA- | IISESGGIKEYVDSVKG- | ARDWFARNEYQYDY- | 2 |
| | | TYSMAWFRRTPGKEREFVTIISESGGIKEY | | SEQ ID | SEQ ID | SEQ ID | |
| | | VDSVKGRFTVSRDNAKNTVYLQMNSLKPED | | NO: 1356 | NO: 1357 | NO: 1358 | |
| | | TAVYYCAAARDWFARNEYQYDYWGQGTQVT | | | | | |
| | | VSS- | | | | | |
| | | SEQ ID | | | | | |
| | | NO: 297 | | | | | |
| 539 | 298 | QVQLVESGGGLVQAGGSLRLSCAASGDVFV | b104 | RYTMA- | SVTDSGRTTEYVDSVKG- | NTDYFQIRSLDLNT- | 20 |
| | | RYTMAWFRQAPGKEREFVASVTDSGRTTEY | | SEQ ID | SEQ ID | SEQ ID | |
| | | VDSVKGRFTVSRDNAKNTAYLQMNNLKPED | | NO: 1359 | NO: 1360 | NO: 1361 | |
| | | TAIYYCAANTDYFQIRSLDLNTWGQGTQVT | | | | | |
| | | VSS- | | | | | |
| | | SEQ ID | | | | | |
| | | NO: 298 | | | | | |
| 540 | 299 | QVQLVESGGGLVQAGGSLRLSCAVSGDVFV | b134 | RYTMA- | SVTDSGRTTEYVDSVKG- | NTDYFQIRSLDLNT- | 20 |
| | | RYTMAWFRQAPGKEREFVASVTDSGRTTEY | | SEQ ID | SEQ ID | SEQ ID | |
| | | VDSVKGRFTVSRDNAKNTAYLQMNNLKPED | | NO: 1362 | NO: 1363 | NO: 1364 | |
| | | TAVYYCAANTDYFQIRSLDLNTWGQGTQVT | | | | | |
| | | VSL- | | | | | |
| | | SEQ ID | | | | | |
| | | NO: 299 | | | | | |
| 541 | 300 | EVQLVESGGGLVQAGGSLRLSCAVSGDVFV | b34 | RYTMA- | SVTDSGRTTEYVDSVKG- | NTDYFQIRSLDLNT- | 20 |
| | | RYTMAWFRQAPGKEREFVASVTDSGRTTEY | | SEQ ID | SEQ ID | SEQ ID | |
| | | VDSVKGRFTVSRDNAKNTAYLQMNNLKPED | | NO: 1365 | NO: 1366 | NO: 1367 | |
| | | TAVYYCAANTDYFQIRSLDLNTWGQGTQVT | | | | | |
| | | VSS- | | | | | |
| | | SEQ ID | | | | | |
| | | NO: 300 | | | | | |
| 542 | 301 | QVQLVESGGGLVQAGGSLRLSCAASGDVFV | b105 | RYTMA- | SVTDSGRTTEYVDSVKG- | NTDYFQIRSLNLNT- | 20 |
| | | RYTMAWFRQAPGKEREFVASVTDSGRTTEY | | SEQ ID | SEQ ID | SEQ ID | |
| | | VDSVKGRFTVSRDNAKNTAYLQMNNLKPED | | NO: 1368 | NO: 1369 | NO: 1370 | |
| | | TAVYYCAANTDYFQIRSLNLNTWGQGTQVT | | | | | |
| | | VSS- | | | | | |
| | | SEQ ID | | | | | |
| | | NO: 301 | | | | | |
| 543 | 302 | QVQLQESGGGLVQAGGSLRLSCAASGDVFV | b77 | RYTMA- | SVTDSGRTTEYVDSVKG- | NTDYFQIRSLNLNT- | 20 |
| | | RYTMAWFRQAPGKEREFVASVTDSGRTTEY | | SEQ ID | SEQ ID | SEQ ID | |
| | | VDSVKGRFTVSRDNAKNTAYLQMNNLKPED | | NO: 1371 | NO: 1372 | NO: 1373 | |
| | | TAVYYCAANTDYFQIRSLNLNTWGQGTQVT | | | | | |
| | | VSS- | | | | | |
| | | SEQ ID | | | | | |
| | | NO: 302 | | | | | |
| 544 | 303 | QVQLVESGGGLVQAGGSLRLSCAASGDVFV | b104 | RYTMA- | SVTDSGRTTEYVDSVKG- | NTDYFQIRSLDLNT- | 20 |
| | | RYTMAWFRQAPGKEREFVASVTDSGRTTEY | | SEQ ID | SEQ ID | SEQ ID | |
| | | VDSVKGRFTVSRDNAKNTAYLQMNNLKPED | | NO: 1374 | NO: 1375 | NO: 1376 | |
| | | TAIYYCAANTDYFQIRSLDLNTWGQGTQVT | | | | | |
| | | VSS- | | | | | |
| | | SEQ ID | | | | | |
| | | NO: 303 | | | | | |
| 545 | 304 | EVQLVESGGGLVQAGGSLRLSCAASGDVFV | b13 | RYTMA- | SVTDSGRTTDYVDSVKG- | NTDYFQIKSLDRNT- | 20 |
| | | RYTMAWFRQAPGKEREFVASVTDSGRTTDY | | SEQ ID | SEQ ID | SEQ ID | |
| | | VDSVKGRFTVSRDNAKNTVYLQMNNLKPED | | NO: 1377 | NO: 1378 | NO: 1379 | |
| | | TAVYYCAANTDYFQIKSLDRNTWGQGTQVT | | | | | |
| | | VSS- | | | | | |
| | | SEQ ID | | | | | |
| | | NO: 304 | | | | | |
| 546 | 305 | QVQLVESGGGLVQAGGSLRLSCAVSGDVLV | b138 | RYTMA- | SVTDSGRTTEYVDSVKG- | NTDYFQIRSLDLNT- | 20 |
| | | RYTMAWFRQAPGKEREFVASVTDSGRTTEY | | SEQ ID | SEQ ID | SEQ ID | |
| | | VDSVKGRFTVSRDNAKNTAYLQMNNLKPED | | NO: 1380 | NO: 1381 | NO: 1382 | |
| | | TAVYYCAANTDYFQIRSLDLNTWGQGTQVT | | | | | |
| | | VSS- | | | | | |
| | | SEQ ID | | | | | |
| | | NO: 305 | | | | | |
| 547 | 306 | EVQLVESGGGLVQAGGSLRLSCAASGDVFV | b15 | RYTMA- | SVTDSGRTTEYVDSVKG- | NTDYFQIRSLRANT- | 20 |
| | | RYTMAWFRQTPGKEREFVASVTDSGRTTEY | | SEQ ID | SEQ ID | SEQ ID | |
| | | VDSVKGRFTVSRDNAKNTVYLQMNNLKPED | | NO: 1383 | NO: 1384 | NO: 1385 | |
| | | TAVYYCAANTDYFQIRSLRANTWGQGTQVT | | | | | |
| | | VSS- | | | | | |
| | | SEQ ID | | | | | |
| | | NO: 306 | | | | | |
| 550 | 307 | QVQLVESGGGLVQAGGSLTLSCAASGRAFS | b147 | RYTMA- | AITWLSGSTLYADSVEG- | ALKTITRGQNDYSY- | 1 |
| | | NYPVGWFRQAPGKEREFVAAITWLSGSTLY | | SEQ ID | SEQ ID | SEQ ID | |
| | | ADSVEGRFTISRDNAKNTVYLLMSSLKPED | | NO: 1386 | NO: 1387 | NO: 1388 | |
| | | TALYFCAAALKTITRGQNDYSYWGQGTQVT | | | | | |
| | | VSS- | | | | | |
| | | SEQ ID | | | | | |
| | | NO: 307 | | | | | |
| 551 | 308 | QVQLVESGGGLVQPGGSLRLSCAASGDVFV | b153 | RYTMA- | SVTDSGRTTDYVDSVKG- | NTDYFQIKSLDRNT- | 20 |
| | | RYTMAWFRQAPGKEREFVASVTDSGRTTDY | | SEQ ID | SEQ ID | SEQ ID | |
| | | VDSVKGRFTVSRDNAKNTVYLQMNNLKPED | | NO: 1389 | NO: 1390 | NO: 1391 | |
| | | TAVYYCAANTDYFQIKSLDRNTWGQGTQVT | | | | | |
| | | VSS- | | | | | |
| | | SEQ ID | | | | | |
| | | NO: 308 | | | | | |
| 554 | 309 | QVQLVESGGGLVQAGGSLRLSCAASGDVLV | b108 | RYTMA- | SVTDSGRTTEYVDSVKG- | NTDYFQIRSLDLNT- | 20 |
| | | RYTMAWFRQAPGKEREFVASVTDSGRTTEY | | SEQ ID | SEQ ID | SEQ ID | |
| | | VDSVKGRFTVSRDNAKNTAYLQMNNLKPED | | NO: 1392 | NO: 1393 | NO: 1394 | |
| | | TAIYYCAANTDYFQIRSLDLNTWGQGTQVT | | | | | |
| | | VSS- | | | | | |
| | | SEQ ID | | | | | |
| | | NO: 309 | | | | | |
| 555 | 310 | QVQLVESGGGLVQAGGSLRLSCAVSGDVFV | b135 | RYTMA- | SVTDSGRTTEYVDSVKG- | NTDYFQIRSLDLNT- | 20 |
| | | RYTMAWFRQAPGKEREFVASVTDSGRTTEY | | SEQ ID | SEQ ID | SEQ ID | |
| | | VDSVKGRFTVSRDNAKNTAYLQMNNLKPED | | NO: 1395 | NO: 1396 | NO: 1397 | |
| | | TAVYYCAANTDYFQIRSLDLNTWGQGTQVT | | | | | |
| | | VSS- | | | | | |
| | | SEQ ID | | | | | |
| | | NO: 310 | | | | | |
| 559 | 311 | QVQLVESGGGLVQAGGSLRLSCAASGDVFV | b105 | RYTMA- | SVTDSGRTTEYVDSVKG- | NTDYFQIRSLNLNT- | 20 |
| | | RYTMAWFRQAPGKEREFVASVTDSGRTTEY | | SEQ ID | SEQ ID | SEQ ID | |
| | | VDSVKGRFTVSRDNAKNTAYLQMNNLKPED | | NO: 1398 | NO: 1399 | NO: 1400 | |
| | | TAVYYCAANTDYFQIRSLNLNTWGQGTQVT | | | | | |
| | | VSS- | | | | | |
| | | SEQ ID | | | | | |
| | | NO: 311 | | | | | |
| 573 | 312 | QVQLVESGGGLVQAGGSLRLSCAASGDVFV | b100 | RYTMA- | SVTDSGRTTDYVDSVKG- | NTDYFQIKSLDLNT- | 20 |
| | | RYTMAWFRQAPGKEREFVASVTDSGRTTDY | | SEQ ID | SEQ ID | SEQ ID | |
| | | VDSVKGRFTVSRDNAKNTVYLQMNALKPED | | NO: 1401 | NO: 1402 | NO: 1403 | |
| | | TAVYYCAANTDYFQIKSLDLNTWGQGTQVT | | | | | |
| | | VSS- | | | | | |
| | | SEQ ID | | | | | |
| | | NO: 312 | | | | | |

TABLE 9

| | doorlopende | | | | | | | | |
|---|---|---|---|---|---|---|---|---|---|
| | nummering | | | PE binding | | | | | |
| Clone | Patent | | | ELISA | | P.E. Off-rate ranking SPR-mouse and human IL-2Ra | | | |
| nr. | clone ID | V ID | Clone ID | hu IL-2R | mo IL-2R | Rmax-hu | hd(1/s)-hu | Rmax-mo | kd (1/s)-mo |
| 295 | 27 | 27- | FJ1427_P035MP04G01 | 0.362 | 0.048 | 96.63 | 1.31E−03 | 9.52 | N/A |
| | | MP04G01 | | | | | | | |
| 300 | 28 | 28-MP04D02 | FJ1427_P035MP04D02 | 0.782 | 0.054 | 166.11 | 8.80E−03 | 30.94 | 3.19E−01 |
| 304 | 29 | 29-MP04H02 | FJ1427_P035MP04H02 | 0.157 | 0.050 | 104.01 | 6.25E−03 | 10.31 | N/A |
| 307 | 30 | 30-MP04C03 | FJ1427_P035MP04C03 | 1.488 | 0.048 | 442.69 | 8.44E−03 | 11.53 | N/A |
| 309 | 31 | 31-MP04E03 | FJ1427_P035MP04E03 | 0.706 | 0.495 | 169.31 | 8.43E−02 | 27.1 | 2.83E−01 |
| 345 | 32 | 32-MP04A08 | FJ1427_P035MP04A08 | 0.407 | 0.050 | 256.29 | 6.16E−02 | 9.53 | N/A |
| 355 | 33 | 33-MP04C09 | FJ1427_P035MP04C09 | 1.690 | 0.047 | 332.57 | 3.10E−02 | 10.13 | N/A |
| 377 | 34 | 34-MP04A12 | FJ1427_P035MP04A12 | 1.299 | 3.599 | 323.31 | 3.33E−04 | 342.33 | 8.09E−03 |
| 583 | 35 | 35- | FJ1427_P035MP07G01 | 0.134 | 0.045 | −1.24 | N/A | 5.31 | N/A |
| | | MP07G01 | | | | | | | |
| 590 | 36 | 36-MP07F02 | FJ1427_P035MP07F02 | 0.896 | 0.060 | 63.96 | 3.31E−03 | 112.27 | 7.47E−02 |
| 646 | 37 | 37-MP07F09 | FJ1427_P035MP07F09 | 1.806 | 1.487 | 97.14 | 1.26E−03 | 309.78 | 7.00E−03 |
| 657 | 38 | 38-MP07A11 | FJ1427_P035MP07A11 | 1.307 | 0.173 | 59.76 | 2.35E−03 | 215.77 | 1.49E−02 |
| 289 | 313 | | FJ1427_P035MP04A01 | 0.867 | 0.060 | 282.7 | 1.56E−03 | 78.22 | 1.32E−01 |
| 290 | 314 | | FJ1427_P035MP04B01 | 0.873 | 0.074 | 157.01 | 3.27E−03 | 53.81 | 1.96E−01 |
| 291 | 315 | | FJ1427_P035MP04C01 | 0.264 | 0.049 | 82.41 | 1.24E−03 | 8.6 | N/A |
| 292 | 316 | | FJ1427_P035MP04D01 | 1.024 | 0.066 | 278.79 | 1.82E−03 | 121.22 | 1.13E−01 |
| 293 | 317 | | FJ1427_P035MP04E01 | 1.078 | 0.067 | 188.27 | 2.66E−03 | 112.7 | 1.09E−01 |
| 294 | 318 | | FJ1427_P035MP04F01 | 1.656 | 0.085 | 195.73 | 2.68E−03 | 130.44 | 1.10E−01 |
| 296 | 319 | | FJ1427_P035MP04H01 | 1.665 | 0.109 | 264.66 | 2.06E−03 | 143.64 | 1.04E−01 |
| 297 | 320 | | FJ1427_P035MP04A02 | 1.450 | 0.085 | 177.95 | 3.06E−03 | 120.28 | 1.26E−01 |
| 298 | 321 | | FJ1427_P035MP04B02 | 1.969 | 0.048 | 409.02 | 2.85E−02 | 8.18 | N/A |
| 299 | 322 | | FJ1427_P035MP04C02 | 1.002 | 0.070 | 245.73 | 1.96E−03 | 113.3 | 1.26E−01 |
| 301 | 323 | | FJ1427_P035MP04E02 | 1.980 | 0.049 | 407.94 | 6.52E−03 | 9.4 | N/A |
| 302 | 324 | | FJ1427_P035MP04F02 | 0.196 | 0.049 | 64.5 | 2.60E−03 | 9.4 | N/A |
| 303 | 325 | | FJ1427_P035MP04G02 | 0.980 | 0.066 | 313.74 | 1.48E−03 | 107.94 | 1.14E−01 |
| 305 | 326 | | FJ1427_P035MP04A03 | 1.869 | 0.052 | 375.6 | 7.12E−03 | 9.12 | N/A |
| 306 | 327 | | FJ1427_P035MP04B03 | 1.373 | 0.048 | 373.15 | 4.21E−02 | 9.07 | N/A |
| 308 | 328 | | FJ1427_P035MP04D03 | 1.662 | 0.063 | 271.44 | 1.43E−03 | 51.2 | 1.68E−01 |
| 310 | 329 | | FJ1427_P035MP04F03 | 1.771 | 0.300 | 280.73 | 7.40E−04 | 192.73 | 6.10E−02 |
| 311 | 330 | | FJ1427_P035MP04G03 | 0.933 | 0.049 | 346.95 | 7.44E−03 | 9.04 | N/A |
| 312 | 331 | | FJ1427_P035MP04H03 | 1.254 | 0.442 | 159.47 | 1.00E−03 | 212.46 | 2.97E−02 |
| 313 | 332 | | FJ1427_P035MP04A04 | 1.307 | 0.050 | 370.31 | 3.78E−02 | 8.97 | N/A |
| 315 | 333 | | FJ1427_P035MP04C04 | 1.432 | 0.063 | 153.37 | 2.14E−03 | 67.05 | 1.51E−01 |
| 317 | 334 | | FJ1427_P035MP04E04 | 1.725 | 0.048 | 350.75 | 7.96E−03 | 9.48 | N/A |
| 319 | 335 | | FJ1427_P035MP04G04 | 1.672 | 0.276 | 270.25 | 1.22E−03 | 205.91 | 6.66E−02 |
| 322 | 336 | | FJ1427_P035MP04B05 | 1.489 | 0.063 | 139.55 | 2.92E−03 | 66.97 | 1.38E−01 |
| 323 | 337 | | FJ1427_P035MP04C05 | 1.810 | 0.047 | 376.56 | 7.75E−03 | 9.66 | N/A |
| 328 | 338 | | FJ1427_P035MP04H05 | 1.569 | 0.080 | 199.1 | 2.73E−03 | 127.82 | 1.08E−01 |
| 329 | 339 | | FJ1427_P035MP04A06 | 0.898 | 0.063 | 187.84 | 2.83E−03 | 118.49 | 1.13E−01 |
| 330 | 340 | | FJ1427_P035MP04B06 | 1.445 | 0.048 | 409.59 | 2.08E−02 | 11.37 | N/A |
| 331 | 341 | | FJ1427_P035MP04C06 | 0.797 | 0.061 | 222.95 | 2.01E−03 | 70.8 | 4.65E−02 |
| 332 | 342 | | FJ1427_P035MP04D06 | 2.099 | 0.637 | 181.62 | 1.45E−03 | 202.27 | 1.37E−02 |
| 334 | 343 | | FJ1427_P035MP04F06 | 1.409 | 0.077 | 146.16 | 2.98E−03 | 106.98 | 1.16E−01 |
| 337 | 344 | | FJ1427_P035MP04A07 | 1.898 | 0.049 | 404.72 | 1.96E−02 | 11.4 | N/A |
| 338 | 345 | | FJ1427_P035MP04B07 | 1.938 | 0.047 | 365.49 | 1.87E−02 | 10.21 | N/A |
| 341 | 346 | | FJ1427_P035MP04E07 | 0.919 | 0.079 | 298.94 | 1.89E−03 | 69.38 | 2.15E−01 |
| 342 | 347 | | FJ1427_P035MP04F07 | 0.789 | 0.064 | 195.88 | 2.49E−03 | 64.64 | 1.56E−01 |
| 343 | 348 | | FJ1427_P035MP04G07 | 0.863 | 0.049 | 364.63 | 9.10E−03 | 12.59 | N/A |
| 344 | 349 | | FJ1427_P035MP04H07 | 0.919 | 0.076 | 289.33 | 1.54E−03 | 132.57 | 1.01E−01 |
| 346 | 350 | | FJ1427_P035MP04B08 | 1.441 | 0.075 | 251 | 2.05E−03 | 127.43 | 1.13E−01 |
| 348 | 351 | | FJ1427_P035MP04D08 | 0.579 | 0.048 | 344.95 | 1.95E−02 | 11.46 | N/A |
| 349 | 352 | | FJ1427_P035MP04E08 | 1.228 | 0.078 | 261.72 | 1.97E−03 | 115.24 | 1.22E−01 |
| 351 | 353 | | FJ1427_P035MP04G08 | 1.836 | 0.049 | 390.91 | 8.92E−03 | 9.87 | N/A |
| 352 | 354 | | FJ1427_P035MP04H08 | 1.298 | 0.053 | 339.74 | 4.80E−02 | 10.92 | N/A |
| 353 | 355 | | FJ1427_P035MP04A09 | 1.231 | 0.049 | 279.47 | 5.76E−02 | 9.51 | N/A |
| 354 | 356 | | FJ1427_P035MP04B09 | 1.544 | 0.083 | 355.43 | 1.46E−03 | 134.71 | 1.22E−01 |
| 356 | 357 | | FJ1427_P035MP04D09 | 1.928 | 0.048 | 411.82 | 2.07E−02 | 13.61 | N/A |
| 357 | 358 | | FJ1427_P035MP04E09 | 0.652 | 0.070 | 278.01 | 1.62E−03 | 97.04 | 1.09E−01 |
| 358 | 359 | | FJ1427_P035MP04F09 | 1.774 | 0.049 | 394.46 | 7.95E−03 | 10.55 | N/A |
| 359 | 360 | | FJ1427_P035MP04G09 | 0.559 | 0.050 | 259.1 | 6.58E−02 | 11.22 | N/A |
| 360 | 361 | | FJ1427_P035MP04H09 | 1.871 | 0.050 | 385.95 | 2.22E−02 | 12.05 | N/A |
| 361 | 362 | | FJ1427_P035MP04A10 | 1.846 | 0.048 | 383.76 | 2.04E−02 | 10.63 | N/A |
| 362 | 363 | | FJ1427_P035MP04B10 | 1.474 | 0.047 | 348.83 | 7.49E−03 | 10.52 | N/A |
| 363 | 364 | | FJ1427_P035MP04C10 | 1.335 | 0.047 | 406.12 | 2.05E−02 | 10.49 | N/A |
| 364 | 365 | | FJ1427_P035MP04D10 | 1.263 | 0.077 | 364.55 | 1.39E−03 | 124.4 | 1.20E−01 |
| 366 | 366 | | FJ1427_P035MP04F10 | 0.751 | 0.048 | 306.49 | 1.47E−02 | 8.01 | N/A |
| 367 | 367 | | FJ1427_P035MP04G10 | 0.839 | 0.049 | 353.65 | 1.04E−02 | 11.45 | N/A |
| 368 | 368 | | FJ1427_P035MP04H10 | 1.804 | 0.049 | 406.1 | 9.98E−03 | 12.25 | N/A |
| 369 | 369 | | FJ1427_P035MP04A11 | 0.593 | 0.050 | 371.26 | 1.65E−02 | 12.01 | N/A |
| 370 | 370 | | FJ1427_P035MP04B11 | 0.750 | 0.047 | 343.62 | 1.03E−02 | 10.16 | N/A |
| 371 | 371 | | FJ1427_P035MP04C11 | 0.912 | 0.047 | 319.23 | 6.93E−02 | 10.94 | N/A |
| 372 | 372 | | FJ1427_P035MP04D11 | 1.411 | 0.048 | 295.74 | 4.01E−02 | 11.15 | N/A |
| 373 | 373 | | FJ1427_P035MP04E11 | 0.940 | 0.065 | 362.54 | 1.49E−03 | 113.67 | 1.17E−01 |
| 374 | 374 | | FJ1427_P035MP04F11 | 2.008 | 0.049 | 386.1 | 1.11E−02 | 10.84 | N/A |
| 375 | 375 | | FJ1427_P035MP04G11 | 1.396 | 0.048 | 356.15 | 1.16E−02 | 11.91 | N/A |
| 376 | 376 | | FJ1427_P035MP04H11 | 1.774 | 0.049 | 272.2 | 1.03E−02 | 13.42 | N/A |
| 378 | 377 | | FJ1427_P035MP04B12 | 0.936 | 0.074 | 98.96 | 3.44E−03 | 125.8 | 1.16E−01 |
| 379 | 378 | | FJ1427_P035MP04C12 | 1.684 | 0.048 | 372.74 | 7.32E−03 | 11.68 | N/A |
| 380 | 379 | | FJ1427_P035MP04D12 | 1.051 | 0.054 | 392.49 | 7.20E−03 | 9.89 | N/A |
| 381 | 380 | | FJ1427_P035MP04E12 | 1.333 | 0.051 | 403.48 | 6.88E−03 | 9.73 | N/A |
| 382 | 381 | | FJ1427_P035MP04F12 | 2.024 | 0.049 | 397.28 | 7.14E−03 | 9.91 | N/A |
| 577 | 382 | | FJ1427_P035MP07A01 | 0.478 | 0.045 | 191.09 | 1.51E−03 | 38.78 | 1.18E−01 |
| 578 | 383 | | FJ1427_P035MP07B01 | 0.518 | 0.049 | 165.79 | 2.35E−03 | 83.09 | 1.00E−01 |
| 579 | 384 | | FJ1427_P035MP07C01 | 0.945 | 0.923 | 129.88 | 1.13E−03 | 296.03 | 6.94E−03 |
| 580 | 385 | | FJ1427_P035MP07D01 | 1.191 | 0.051 | 108.22 | 2.94E−03 | 103.53 | 1.13E−01 |
| 581 | 386 | | FJ1427_P035MP07E01 | 0.830 | 0.139 | 73.58 | 1.56E−03 | 162.58 | 1.32E−02 |
| 582 | 387 | | FJ1427_P035MP07F01 | 0.556 | 0.047 | 102.03 | 2.97E−03 | 79.2 | 8.55E−02 |
| 584 | 388 | | FJ1427_P035MP07H01 | 0.818 | 0.133 | 135.33 | 1.25E−03 | 154.75 | 2.74E−02 |
| 585 | 389 | | FJ1427_P035MP07A02 | 0.829 | 0.063 | 96.66 | 1.76E−03 | 199.59 | 1.16E−02 |
| 586 | 390 | | FJ1427_P035MP07B02 | 1.324 | 0.061 | 71.34 | 2.32E−03 | 153.09 | 1.51E−02 |
| 587 | 391 | | FJ1427_P035MP07C02 | 0.480 | 0.044 | 386.82 | 1.86E−02 | 11.07 | N/A |
| 588 | 392 | | FJ1427_P035MP07D02 | 0.599 | 0.057 | 111.68 | 1.52E−03 | 199.85 | 1.27E−02 |
| 589 | 393 | | FJ1427_P035MP07E02 | 0.620 | 0.061 | 88.48 | 2.06E−03 | 212.67 | 1.32E−02 |
| 591 | 394 | | FJ1427_P035MP07G02 | 1.220 | 0.051 | 86.45 | 3.65E−03 | 80.49 | 1.00E−01 |
| 592 | 395 | | FJ1427_P035MP07H02 | 0.801 | 0.066 | 106.45 | 1.88E−03 | 215.31 | 1.23E−02 |
| 593 | 396 | | FJ1427_P035MP07A03 | 1.691 | 0.869 | 66.93 | 1.74E−03 | 216.69 | 7.95E−03 |
| 594 | 397 | | FJ1427_P035MP07B03 | 1.552 | 0.058 | 48.01 | 2.78E−03 | 81.25 | 1.32E−02 |
| 595 | 398 | | FJ1427_P035MP07C03 | 0.982 | 0.046 | 71.75 | 3.53E−03 | 48.29 | 1.14E−01 |
| 596 | 399 | | FJ1427_P035MP07D03 | 1.247 | 0.046 | 84.13 | 3.39E−03 | 58.38 | 1.07E−01 |
| 597 | 400 | | FJ1427_P035MP07E03 | 0.445 | 0.048 | 111.6 | 3.11E−03 | 92.04 | 9.66E−02 |
| 598 | 401 | | FJ1427_P035MP07F03 | 0.497 | 0.046 | 103.9 | 3.21E−03 | 69.3 | 1.05E−01 |
| 599 | 402 | | FJ1427_P035MP07G03 | 0.495 | 0.048 | 113.65 | 3.09E−03 | 76.89 | 9.90E−02 |
| 601 | 403 | | FJ1427_P035MP07A04 | 0.507 | 0.046 | 130.63 | 1.26E−03 | 44.97 | 1.49E−01 |
| 602 | 404 | | FJ1427_P035MP07B04 | 0.970 | 0.047 | 121.03 | 2.77E−03 | 54.41 | 1.14E−01 |
| 603 | 405 | | FJ1427_P035MP07C04 | 0.406 | 0.045 | 153.69 | 2.67E−03 | 94.18 | 9.28E−02 |
| 604 | 406 | | FJ1427_P035MP07D04 | 0.792 | 0.046 | 99.59 | 2.43E−03 | 44.76 | 1.61E−01 |
| 605 | 407 | | FJ1427_P035MP07E04 | 0.729 | 0.046 | 146.95 | 2.59E−03 | 76.19 | 1.03E−01 |
| 606 | 408 | | FJ1427_P035MP07F04 | 0.400 | 0.047 | 128.1 | 2.96E−03 | 53.51 | 1.15E−01 |
| 607 | 409 | | FJ1427_P035MP07G04 | 1.017 | 0.047 | 135.81 | 2.81E−03 | 50.92 | 1.12E−01 |
| 608 | 410 | | FJ1427_P035MP07H04 | 0.593 | 0.052 | 142.73 | 1.77E−03 | 97.39 | 8.23E−02 |
| 609 | 411 | | FJ1427_P035MP07A05 | 0.973 | 0.046 | 105.7 | 3.23E−03 | 48.45 | 1.27E−01 |
| 610 | 412 | | FJ1427_P035MP07B05 | 0.439 | 0.045 | 139.96 | 2.82E−03 | 83.18 | 1.10E−01 |
| 611 | 413 | | FJ1427_P035MP07C05 | 0.479 | 0.047 | 113.52 | 1.82E−03 | 139.59 | 1.28E−02 |
| 612 | 414 | | FJ1427_P035MP07D05 | 0.733 | 0.054 | 132.87 | 1.53E−03 | 159.41 | 6.09E−02 |
| 613 | 415 | | FJ1427_P035MP07E05 | 0.434 | 0.045 | 84.27 | 3.72E−03 | 52.18 | 1.20E−01 |
| 614 | 416 | | FJ1427_P035MP07F05 | 0.405 | 0.045 | 101.39 | 3.23E−03 | 53 | 1.16E−01 |
| 615 | 417 | | FJ1427_P035MP07G05 | 0.450 | 0.046 | 88.5 | 2.57E−03 | 32.76 | 1.91E−01 |
| 616 | 418 | | FJ1427_P035MP07H05 | 1.141 | 0.049 | 134.27 | 2.79E−03 | 97.11 | 1.18E−01 |
| 617 | 419 | | FJ1427_P035MP07A06 | 1.119 | 0.047 | 134.97 | 2.73E−03 | 69.04 | 1.09E−01 |
| 618 | 420 | | FJ1427_P035MP07B06 | 0.902 | 0.045 | 119.08 | 3.22E−03 | 51.58 | 1.12E−01 |
| 619 | 421 | | FJ1427_P035MP07C06 | 0.319 | 0.045 | 133.96 | 2.79E−03 | 60.36 | 1.11E−01 |
| 620 | 422 | | FJ1427_P035MP07D06 | 0.919 | 0.045 | 143.54 | 2.88E−03 | 58.87 | 1.26E−01 |
| 621 | 423 | | FJ1427_P035MP07E06 | 0.464 | 0.046 | 169.4 | 2.72E−03 | 99.58 | 1.02E−01 |
| 622 | 424 | | FJ1427_P035MP07F06 | 1.343 | 0.082 | 162.47 | 1.62E−03 | 239.55 | 1.17E−02 |
| 625 | 425 | | FJ1427_P035MP07A07 | 1.039 | 0.047 | 194.33 | 1.73E−03 | 66.11 | 9.71E−02 |
| 626 | 426 | | FJ1427_P035MP07B07 | 0.290 | 0.045 | 128.36 | 2.59E−03 | 57.11 | 3.47E−03 |
| 627 | 427 | | FJ1427_P035MP07C07 | 0.469 | 0.047 | 145.52 | 2.50E−03 | 64.9 | 1.05E−01 |
| 629 | 428 | | FJ1427_P035MP07E07 | 0.359 | 0.047 | 74.37 | 2.25E−03 | 60.14 | 9.27E−02 |
| 630 | 429 | | FJ1427_P035MP07F07 | 0.372 | 0.045 | 91.37 | 3.00E−03 | 47.67 | 1.33E−01 |
| 631 | 430 | | FJ1427_P035MP07G07 | 0.479 | 0.045 | 128.46 | 2.73E−03 | 90.68 | 1.06E−01 |
| 632 | 431 | | FJ1427_P035MP07H07 | 1.415 | 0.047 | 80.51 | 4.18E−03 | 21.68 | 3.31E−03 |
| 633 | 432 | | FJ1427_P035MP07A08 | 0.889 | 0.049 | 143.26 | 2.55E−03 | 80.83 | 1.06E−01 |
| 634 | 433 | | FJ1427_P035MP07B08 | 0.425 | 0.044 | 89.12 | 3.26E−03 | 32.8 | 1.44E−01 |
| 635 | 434 | | FJ1427_P035MP07C08 | 0.528 | 0.049 | 153.91 | 2.59E−03 | 92.76 | 1.08E−01 |
| 636 | 435 | | FJ1427_P035MP07D08 | 1.031 | 0.050 | 159.87 | 2.63E−03 | 118.36 | 9.91E−02 |
| 637 | 436 | | FJ1427_P035MP07E08 | 0.642 | 0.049 | 109.34 | 2.29E−03 | 73.2 | 1.30E−01 |
| 638 | 437 | | FJ1427_P035MP07F08 | 1.241 | 0.052 | 130.42 | 1.85E−03 | 92.37 | 1.00E−01 |
| 639 | 438 | | FJ1427_P035MP07G08 | 0.504 | 0.047 | 124.62 | 3.00E−03 | 87.05 | 1.05E−01 |
| 640 | 439 | | FJ1427_P035MP07H08 | 0.510 | 0.047 | 127.29 | 3.03E−03 | 78.98 | 1.00E−01 |
| 641 | 440 | | FJ1427_P035MP07A09 | 0.518 | 0.055 | 129.97 | 1.61E−03 | 181.98 | 1.19E−02 |
| 642 | 441 | | FJ1427_P035MP07B09 | 1.268 | 0.082 | 119.23 | 1.68E−03 | 213.73 | 1.27E−02 |
| 643 | 442 | | FJ1427_P035MP07C09 | 0.723 | 0.755 | 104.15 | 1.37E−03 | 338.19 | 7.03E−03 |
| 644 | 443 | | FJ1427_P035MP07D09 | 0.865 | 0.045 | 57.07 | 4.47E−03 | 45.2 | 1.26E−01 |
| 645 | 444 | | FJ1427_P035MP07E09 | 0.428 | 0.045 | 89.11 | 3.30E−03 | 74.19 | 1.08E−01 |
| 647 | 445 | | FJ1427_P035MP07G09 | 1.144 | 0.047 | 61.25 | 2.40E−03 | 75.21 | 1.01E−01 |
| 648 | 446 | | FJ1427_P035MP07H09 | 1.111 | 0.049 | 79.96 | 3.46E−03 | 100.7 | 1.35E−01 |
| 649 | 447 | | FJ1427_P035MP07A10 | 0.759 | 0.053 | 80 | 2.42E−03 | 103.16 | 7.67E−02 |
| 650 | 448 | | FJ1427_P035MP07B10 | 0.716 | 0.059 | 87.5 | 1.75E−03 | 138.94 | 5.01E−02 |
| 651 | 449 | | FJ1427_P035MP07C10 | 0.424 | 0.074 | 77.95 | 1.76E−03 | 229.75 | 1.32E−02 |
| 652 | 450 | | FJ1427_P035MP07D10 | 0.734 | 0.048 | 53.81 | 3.00E−03 | 68.81 | 1.25E−01 |
| 653 | 451 | | FJ1427_P035MP07E10 | 0.434 | 0.047 | 93.39 | 3.30E−03 | 85.46 | 1.07E−01 |
| 654 | 452 | | FJ1427_P035MP07F10 | 0.670 | 0.089 | 64.41 | 1.99E−03 | 164.14 | 1.21E−02 |
| 655 | 453 | | FJ1427_P035MP07G10 | 0.682 | 0.740 | 96.71 | 1.22E−03 | 325.7 | 6.82E−03 |
| 656 | 454 | | FJ1427_P035MP07H10 | 0.572 | 0.049 | 54.04 | 2.36E−03 | 126.54 | 1.37E−02 |
| 658 | 455 | | FJ1427_P035MP07B11 | 1.246 | 0.246 | 54.36 | 2.14E−03 | 229.6 | 1.14E−02 |
| 659 | 456 | | FJ1427_P035MP07C11 | 0.858 | 0.046 | 62.86 | 4.85E−03 | 63.59 | 1.68E−01 |
| 661 | 457 | | FJ1427_P035MP07E11 | 0.398 | 0.045 | 107.25 | 3.04E−03 | 88.26 | 1.09E−01 |
| 662 | 458 | | FJ1427_P035MP07F11 | 0.983 | 0.686 | 107.78 | 1.31E−03 | 321.3 | 7.57E−03 |
| 663 | 459 | | FJ1427_P035MP07G11 | 0.999 | 0.046 | 77.9 | 3.51E−03 | 75.72 | 9.90E−02 |
| 664 | 460 | | FJ1427_P035MP07H11 | 1.316 | 0.057 | 70.12 | 2.52E−03 | 101.05 | 6.60E−02 |
| 665 | 461 | | FJ1427_P035MP07A12 | 0.485 | 0.052 | 67.93 | 2.70E−03 | 92.95 | 7.48E−02 |
| 666 | 462 | | FJ1427_P035MP07B12 | 1.789 | 0.700 | 61.23 | 1.53E−03 | 197.54 | 7.66E−03 |
| 667 | 463 | | FJ1427_P035MP07C12 | 0.426 | 0.071 | 64.81 | 1.97E−03 | 190.43 | 1.46E−02 |
| 668 | 464 | | FJ1427_P035MP07D12 | 0.511 | 0.051 | 62.42 | 1.99E−03 | 141.1 | 1.22E−02 |
| 669 | 465 | | FJ1427_P035MP07E12 | 0.956 | 0.050 | 60.15 | 3.05E−03 | 84.92 | 8.83E−02 |
| 670 | 466 | | FJ1427_P035MP07F12 | 0.823 | 0.341 | 46.09 | 1.97E−03 | 193.35 | 7.92E−03 |

| | doorlopende | | | | | | |
|---|---|---|---|---|---|---|---|
| | nummering | | | | | | |
| Clone | Patent clone | Sequence analysis | | | | | CDR3 |
| nr. | ID | VH | VH ID | CDR1 | CDR2 | CDR3 | Family ID |
| 295 | 27 | QVQLVESGGGLVQAGGSLTLSCAAPGRTFGTDVVGWFRQAPGKE | 5_c | TDVVG-SEQ | SISRSGDGIYY | GDGWSTYDY-SEQ | 4 |
| | | REFVASISRSGDGIYYDDSVKGRFTISRNNAWNTVNLQMNSLKVED | | ID NO: 545 | DDSVKG-SEQ | ID NO: 547 | |
| | | TAVYYCAAGDGWSTYDYWGQGTQVTVSS-SEQ ID NO: 27 | | | ID NO: 546 | | |
| 300 | 28 | QVQLVESGGGLVQAGGSLRLSCAASGRTLSRYAMGWFRQAPGKE | 7_c | RYAMG- | ANSWGGDTY | APTSFATTAYSGSN | 1 |
| | | REFVTANSWGGDTYYADSVQGRFTFSRDNAKNTVYLQMNSLQPED | | SEQ ID NO: | YADSVQG- | SYAY-SEQ ID NO: | |
| | | TAVYYCAAAPTSFATTAYSGSNSYAYWGQGTQVTVSS-SEQ ID | | 548 | SEQ ID NO: | 550 | |
| | | NO: 28 | | | 549 | | |
| 304 | 29 | QVQLVESGGGLVQAGGSLRLACVASGLTFDNYYMGWFRQAPGKE | 9_c | NYYMG- | GIIWNGDHTA | TFWIERATTPDIGQ | 7 |
| | | REFVAGIIWNGDHTAYADSIKGRFTISRDNAKNTAYLRMNSLKPEDT | | SEQ ID NO: | YADSIKG- | YAY-SEQ ID NO: | |
| | | AVYYCAATFWIERATTPDIGQYAYWGQGTQVTVSS-SEQ ID NO: 29 | | 551 | SEQ ID NO: | 553 | |
| | | | | | 552 | | |
| 307 | 30 | EVQLVESGGGWVQDGGSLRLSCALSGRTFVRGIMGWFRQAPGKE | 12_c | RGIMG-SEQ | RIIWHINSTRY | RDRYGSGNSLSPS | 6 |
| | | REFVARIIWHINSTRYADSVKGRFTISRDSAKNTMYLQMDSLRPEDT | | ID NO: 554 | ADSVKG-SEQ | AYDY-SEQ ID NO: | |
| | | AVYYCAARDRYGSGNSLSPSAYDYWGQGTQVTVSS-SEQ ID NO: | | | ID NO: 555 | 556 | |
| | | 30 | | | | | |
| 309 | 31 | QVQLVESGGGLVQAGGSLRLSCTGYGGAFTGYALGWFRQAPGKE | 14_c | GYALG-SEQ | RINWSGSFTY | DNPSTLATDYDN- | 2 |
| | | REFVARINWSGSFTYYASSVKGRFTISRDNAKNTMYLQMNNLKPED | | ID NO: 557 | YASSVKG- | SEQ ID NO: 559 | |
| | | TAVYYCAADNPSTLATDYDNWGQGTQVTVSS-SEQ ID NO: 31 | | | SEQ ID NO: | | |
| | | | | | 558 | | |
| 345 | 32 | QVQLVESGGGLVQAGGSLRLSCAASGRTFGSTAVGWFRQVPGKE | 31_c | STAVG-SEQ | AINRSGSATTY | DSLPYGRPYYFQRS | 3 |
| | | REFVSAINRSGSATTYADSVKGRFTISRDNAKNTVYLQMNSLTPEDT | | ID NO: 560 | ADSVKG-SEQ | AGEYDY-SEQ ID | |
| | | GVYYCAADSLPYGRPYYFQRSAGEYDYWGQGTQVTVSS-SEQ ID | | | ID NO: 561 | NO: 562 | |
| | | NO: 32 | | | | | |
| 355 | 33 | QLQLVESGGGLVQAGGSLRLSCAASGPTFSRVAVGWFRQAPGKER | 36_c | RVAVG-SEQ | AVNRPATMTK | DSVPYGRPYYWQT | 3 |
| | | EFVAAVNRPATMTKYADSVKGRFTVSRDNAKNTVDLQMNSMKPED | | ID NO: 563 | YADSVKG- | SAGDYDY-SEQ ID | |
| | | TAVYYCAADSVPYGRPYYWQTSAGDYDYWGQGTQVTVSS-SEQ | | | SEQ ID NO: | NO: 565 | |
| | | ID NO: 33 | | | 564 | | |
| 377 | 34 | QVQLVESGGGLVQAGSSLRLSCAASGRTLSRLAMGWFRQAPGKER | 53_c | RLAMG- | VNSWGGDTF | APTSFATTAYSSSN | 1 |
| | | EFVAVNSWGGDTFYADSVEGRFTYSRDNAKSAVYLQMNSLQPEDT | | SEQ ID NO: | YADSVEG- | SYAY-SEQ ID NO: | |
| | | AVYYCAAAPTSFATTAYSSSNSYAYWGQGAQVTVSS-SEQ ID NO: | | 566 | SEQ ID NO: | 568 | |
| | | 34 | | | 567 | | |
| 583 | 35 | QVQLQESGGGLVQGGGSLRLSCAASGGIFSSYAMGWFRQAPGKE | 61_c | SYAMG- | AISRSGRSTN | GRYYNSAYDPSPG | 5 |
| | | REFVAAISRSGRSTNYADSVKGRFTISRDNAKSTVYLQMNSLKPEET | | SEQ ID NO: | YADSVKG- | DFGS-SEQ ID NO: | |
| | | AVYYCAAGRYYNSAYDPSPGDFGSWGHGTQVTVSS-SEQ ID NO: | | 569 | SEQ ID NO: | 571 | |
| | | 35 | | | 570 | | |
| 590 | 36 | QVQLVESGGGLVQAGGSLRLSCAASGRTLSRYAMGWFRQAPGSE | 66_c | RYAMG- | ASSWGGDTF | APTSFPTTAYSSSN | 1 |
| | | REFVAASSWGGDTFYADSVEGRFTFSRDNAKNAVYLQMNSLQPED | | SEQ ID NO: | YADSVEG- | SYAY-SEQ ID NO: | |
| | | TAAYYCAAAPTSFPTTAYSSSNSYAYWGQGTQVTVSS-SEQ ID NO: | | 572 | SEQ ID NO: | 574 | |
| | | 36 | | | 573 | | |
| 646 | 37 | QVQLVESGGGLVQAGGSLRLSCAASGRTLSRYAMGWFRQAPGKE | 85_c | RYAMG- | IDSWGGDTFY | APTSFATTAYSSSN | 1 |
| | | REYVAIDSWGGDTFYADSVEGRFTFSRDNAKNEVYLQMNSLQPED | | SEQ ID NO: | ADSVEG-SEQ | SYRY-SEQ ID NO: | |
| | | TAVYYCAGAPTSFATTAYSSSNSYRYWGQGTQVTVSS-SEQ ID | | 575 | ID NO: 576 | 577 | |
| | | NO: 37 | | | | | |
| 657 | 38 | QVQLVESGGGLVQAGGSLRLSCAASGRSLSRDAMGWFRQAPGKE | 90_c | RDAMG- | VMSWGGDTF | APTSFATTAYSSSN | 1 |
| | | REFVAVMSWGGDTFYTDSVEGRFTFSRDNAKNAVYLEMNDLQPED | | SEQ ID NO: | YTDSVEG- | SYSY-SEQ ID NO: | |
| | | TAVYYCAAAPTSFATTAYSSSNSYSYWGRGTQVTVSS-SEQ ID NO: | | 578 | SEQ ID NO: | 580 | |
| | | 38 | | | 579 | | |
| 289 | 313 | EVQLVESGGGLVQAGGSLRLSCAASGRTLSRYAMGWFRQAPGKE | 1_c | RYAMG- | ANSWGGDTY | APTSFATTAYSSSN | 1 |
| | | REFVTANSWGGDTYYADSVQGRFTFSRDNAKNTVYLQMNSLQPED | | SEQ ID NO: | YADSVQG- | SYAY-SEQ ID NO: | |
| | | TAVYYCAAAPTSFATTAYSSSNSYAYWGQGTQVTVSS-SEQ ID NO: | | 1405 | SEQ ID NO: | 1407 | |
| | | 313 | | | 1406 | | |
| 290 | 314 | EVQLVESGGGLVQAGASLRLSCAASGRTLSRYAMGWFRQAPGKER | 2_c | RYAMG- | ASSWGGDTY | APTSFATTAYSSSN | 1 |
| | | EFVAASSWGGDTYYADSVEGRFTFSRDNAKNAVYLQMNSLQPEDT | | SEQ ID NO: | YADSVEG- | SYAY-SEQ ID NO: | |
| | | AVYYCAGAPTSFATTAYSSSNSYAYWGQGTQVTVSS-SEQ ID NO: | | 1408 | SEQ ID NO: | 1410 | |
| | | 314 | | | 1409 | | |
| 291 | 315 | QVQLVESGGGLVQAGGSLTLSCAASGRTFSTDVVGWFRQAPGKER | 3_c | TDVVG-SEQ | SISRSGDGIYY | GDGWSTYDY-SEQ | 4 |
| | | EFVASISRSGDGIYYDDSVKGRFTISRNNAWNTVNLQMNNLKVEDT | | ID NO: 1411 | DDSVKG-SEQ | ID NO: 1413 | |
| | | AVYYCAAGDGWSTYDYWGQGTQVTVSS-SEQ ID NO: 315 | | | ID NO: 1412 | | |
| 292 | 316 | QVQLVESGGGLVQAGGSLRLSCAASGRTLSRYAMGWFRQAPGKE | 4_c | RYAMG- | ANSWGGDTY | APTSFATTAYSSSN | 1 |
| | | REFVTANSWGGDTYYADSVQGRFTFSRDNAKNTVYLQMNSLQPED | | SEQ ID NO: | YADSVQG- | SYAY-SEQ ID NO: | |
| | | TAVYYCAAAPTSFATTAYSSSNSYAYWGQGTQVTVSS-SEQ ID NO: | | 1414 | SEQ ID NO: | 1416 | |
| | | 316 | | | 1415 | | |
| 293 | 317 | QVQLVESGGGLVQAGGSLRLSCAASGRTLSRYAMGWFRQAPGKE | 4_c | RYAMG- | ANSWGGDTY | APTSFATTAYSSSN | 1 |
| | | REFVTANSWGGDTYYADSVQGRFTFSRDNAKNTVYLQMNSLQPED | | SEQ ID NO: | YADSVQG- | SYAY-SEQ ID NO: | |
| | | TAVYYCAAAPTSFATTAYSSSNSYAYWGQGTQVTVSS-SEQ ID NO: | | 1417 | SEQ ID NO: | 1419 | |
| | | 317 | | | 1418 | | |
| 294 | 318 | QVQLVESGGGLVQAGGSLRLSCAASGRTLSRYAMGWFRQAPGKE | 4_c | RYAMG- | ANSWGGDTY | APTSFATTAYSSSN | 1 |
| | | REFVTANSWGGDTYYADSVQGRFTFSRDNAKNTVYLQMNSLQPED | | SEQ ID NO: | YADSVQG- | SYAY-SEQ ID NO: | |
| | | TAVYYCAAAPTSFATTAYSSSNSYAYWGQGTQVTVSS-SEQ ID NO: | | 1420 | SEQ ID NO: | 1422 | |
| | | 318 | | | 1421 | | |
| 296 | 319 | QVQLVESGGGLVQAGGSLRLSCAASGRTLSRYAMGWFRQAPGKE | 4_c | RYAMG- | ANSWGGDTY | APTSFATTAYSSSN | 1 |
| | | REFVTANSWGGDTYYADSVQGRFTFSRDNAKNTVYLQMNSLQPED | | SEQ ID NO: | YADSVQG-SEQ | SYAY-SEQ ID NO: | |
| | | TAVYYCAAAPTSFATTAYSSSNSYAYWGQGTQVTVSS-SEQ ID NO: | | 1423 | ID NO: 1424 | 1425 | |
| | | 319 | | | | | |
| 297 | 320 | QVQLVESGGGLVQAGGSLRLSCAASGRTLSRYAMGWFRQAPGKE | 4_c | RYAMG- | ANSWGGDTY | APTSFATTAYSSSN | 1 |
| | | REFVTANSWGGDTYYADSVQGRFTFSRDNAKNTVYLQMNSLQPED | | SEQ ID NO: | YADSVQG- | SYAY-SEQ ID NO: | |
| | | TAVYYCAAAPTSFATTAYSSSNSYAYWGQGTQVTVSS-SEQ ID NO: | | 1426 | SEQ ID NO: | 1428 | |
| | | 320 | | | 1427 | | |
| 298 | 321 | QVQLVESGGGWVQVGESLRLSCAPSGRTFVSGIMGWFRQTPGKE | 6_c | SGIMG-SEQ | RIILNNNSTRY | RDRYGSGNSLSPS | 6 |
| | | REFVARIILNNNSTRYTDSVKGRFTISRDSAKNTMYLQMNTLRPEDT | | ID NO: 1429 | TDSVKG-SEQ | AYDY-SEQ ID NO: | |
| | | AVYYCAARDRYGSGNSLSPSAYDYWGQGTQVTVSS-SEQ ID NO: | | | ID NO: 1430 | 1431 | |
| | | 321 | | | | | |
| 299 | 322 | QVQLVESGGGLVQAGGSLRLSCAASGRTLSRYAMGWFRQAPGKE | 4_c | RYAMG- | ANSWGGDTY | APTSFATTAYSSSN | 1 |
| | | REFVTANSWGGDTYYADSVQGRFTFSRDNAKNTVYLQMNSLQPED | | SEQ ID NO: | YADSVQG- | SYAY-SEQ ID NO: | |
| | | TAVYYCAAAPTSFATTAYSSSNSYAYWGQGTQVTVSS-SEQ ID NO: | | 1432 | SEQ ID NO: | 1434 | |
| | | 322 | | | 1433 | | |
| 301 | 323 | QVQLVESGGGWVQVGESLRLSCAPSGRTFVSGIMGWFRQTPGKE | 6_c | SGIMG-SEQ | RIILNNNSTRY | RDRYGSGNSLSPS | 6 |
| | | REFVARIILNNNSTRYTDSVKGRFTISRDSAKNTMYLQMNTLRPEDT | | ID NO: 1435 | TDSVKG-SEQ | AYDY-SEQ ID NO: | |
| | | AVYYCAARDRYGSGNSLSPSAYDYWGQGTQVTVSS-SEQ ID NO: | | | ID NO: 1436 | 1437 | |
| | | 323 | | | | | |
| 302 | 324 | QLQLVESGGGLVQAGGSLTLSCAASGRTFSRDVVGWFRQAPGKER | 8_c | RDVVG- | SISRSGDGTF | GDGWSTYDY-SEQ | 4 |
| | | EFVASISRSGDGTFYTDSVKGRFTISSRDNAKNTVLLQMNSLKVEDT | | SEQ ID NO: | YTDSVKG- | ID NO: 1440 | |
| | | AVYYCAAGDGWSTYDYWGQGTQVTVSS-SEQ ID NO: 324 | | 1438 | SEQ ID NO: | | |
| | | | | | 1439 | | |
| 303 | 325 | QVQLVESGGGLVQAGGSLRLSCAASGRTLSRYAMGWFRQAPGKE | 4_c | RYAMG- | ANSWGGDTY | APTSFATTAYSSSN | 1 |
| | | REFVTANSWGGDTYYADSVQGRFTFSRDNAKNTVYLQMNSLQPED | | SEQ ID NO: | YADSVQG- | SYAY-SEQ ID NO: | |
| | | TAVYYCAAAPTSFATTAYSSSNSYAYWGQGTQVTVSS-SEQ ID NO: | | 1441 | SEQ ID NO: | 1443 | |
| | | 325 | | | 1442 | | |
| 305 | 326 | EVQLVESGGGWVQVGESLRLSCAPSGRTFVSGIMGWFRQTPGKE | 10_c | SGIMG-SEQ | RIILNNNSTRY | RDRYGSGNSLSPS | 6 |
| | | REFVARIILNNNSTRYTDSVKGRFTISRDSAKNTMYLQMNTLRPEDT | | ID NO: 1444 | TDSVKG-SEQ | AYDY-SEQ ID NO: | |
| | | AVYYCAARDRYGSGNSLSPSAYDYWGQGTQVTVSS-SEQ ID NO: | | | D NO: 1445 | 1446 | |
| | | 326 | | | | | |
| 306 | 327 | QVQLQESGGGLVQAGESLRLSCAASGPTASRVAVAWFRQVPGKER | 11_c | RVAVA-SEQ | VVNRPGTMTK | DSVPYGRPYYFQTS | 3 |
| | | EFVAVVNRPGTMTKYADSVKGRFTISRDSAKNTVYLQMNSLKPEDT | | ID NO: 1447 | YADSVKG- | AGNYDY-SEQ ID | |
| | | AVYYCAADSVPYGRPYYFQTSAGNYDYWGQGTQVTVSS-SEQ ID | | | SEQ ID NO: | NO: 1449 | |
| | | NO: 327 | | | 1448 | | |
| 308 | 328 | EVQLVESGGGLVQAEGSLRLSCAASGRTLSRYAMGWFRQAPGKER | 13_c | RYAMG- | ANSWGGDTY | APTSFATTAYSSSN | 1 |
| | | EFVTANSWGGDTYYADSVQGRFTFSRDNAKNTVYLQMNSLQPEDT | | SEQ ID NO: | YADSVQG- | SYAY-SEQ ID NO: | |
| | | AVYYCAAAPTSFATTAYSSSNSYAYWGQGTQVTVSS-SEQ ID NO: | | 1450 | SEQ ID NO: | 1452 | |
| | | 328 | | | 1451 | | |
| 310 | 329 | QVQLVESGGGLVQAGGSLRLSCAASGRTLSRNAMGWFRQAPGKE | 15_c | RNAMG- | ADSWGGDTF | APTSFATTAYSSSN | 1 |
| | | REFVAADSWGGDTFYADSVEGRFTFSRDNAKNAVYLQMNSLQPED | | SEQ ID NO: | YADSVEG- | SYRY-SEQ ID NO: | |
| | | TAVYYCAGAPTSFATTAYSSSNSYRYWGQGTQVTVSS-SEQ ID | | 1453 | SEQ ID NO: | 1455 | |
| | | NO: 329 | | | 1454 | | |
| 311 | 330 | EVQLVESGGGWVQVGESLRLSCAPSGRTFVSGIMGWFRQAPGKE | 16_c | SGIMG-SEQ | RIILNNNSTRY | RDRYGSGNSLSPS | 6 |
| | | REFVARIILNNNSTRYTDSVKGRFTISRDSAKNTMYLQMDSLRPEDT | | ID NO: 1456 | TDSVKG-SEQ | AYDY-SEQ ID NO: | |
| | | AVYYCAARDRYGSGNSLSPSAYDYWGQGTQVTVSS-SEQ ID NO: | | | ID NO: 1457 | 1458 | |
| | | 330 | | | | | |
| 312 | 331 | QLQLVESGGGLVQAGGSLRLSCAASGRTLSRYAMGWFRQAPGKE | 17_c | RYAMG- | ADSWGGDTF | APTSFATTAYSSSN | 1 |
| | | REFVAADSWGGDTFYADSVEGRFTFSRDNAKNAAYLQMNSLQPED | | SEQ ID NO: | YADSVEG- | SYRY-SEQ ID NO: | |
| | | TATYYCAGAPTSFATTAYSSSNSYRYWGQGTQVTVSS-SEQ ID | | 1459 | SEQ ID NO: | 1461 | |
| | | NO: 331 | | | 1460 | | |
| 313 | 332 | QVQLVESGGGLVQAGESLRLSCAASGPTASRVAVAWFRQVPGKER | 18_c | RVAVA-SEQ | VVNRPGTMTK | DSVPYGRPYYFQTS | 3 |
| | | EFVAVVNRPGTMTKYADSVKGRFTISRDSAKNTVYLQMNSLKPEDT | | ID NO: 1462 | YADSVKG- | AGNYDY-SEQ ID | |
| | | AVYYCAADSVPYGRPYYFQTSAGNYDYWGQGTQVTVSS-SEQ ID | | | SEQ ID NO: | NO: 1464 | |
| | | NO: 332 | | | 1463 | | |
| 315 | 333 | EVQLVESGGGLVQAGGSLRLSCAASGRTLSRYAMGWFRQAPGKE | 1_c | RYAMG- | ANSWGGDTY | APTSFATTAYSSSN | 1 |
| | | REFVTANSWGGDTYYADSVQGRFTFSRDNAKNTVYLQMNSLQPED | | SEQ ID NO: | YADSVQG- | SYAY-SEQ ID NO: | |
| | | TAVYYCAAAPTSFATTAYSSSNSYAYWGQGTQVTVSS-SEQ ID NO: | | 1465 | SEQ ID NO: | 1467 | |
| | | 333 | | | 1466 | | |
| 317 | 334 | EVQLVESGGGWVQVGESLRLSCVPSGRTFVSGIMGWFRQAPGKE | 19_c | SGIMG-SEQ | RIILNSNSTRY | RDRYGSGNSLSPS | 6 |
| | | REFVARIILNSNSTRYTDSVKGRFTISRDSAKNTMYLQMNSLRPEDT | | ID NO: 1468 | TDSVKG-SEQ | AYDY-SEQ ID NO: | |
| | | AVYYCAARDRYGSGNSLSPSAYDYWGQGTQVTVSS-SEQ ID NO: | | | ID NO: 1469 | 1470 | |
| | | 334 | | | | | |
| 319 | 335 | QVQLVESGGGLVQAGGSLRLSCAASGRTLSRYAVGWFRQAPGKE | 20_c | RYAVG-SEQ | ANSWGGDTF | APTSFATTAYSSSN | 1 |
| | | REFVTANSWGGDTFYADSVQGRFTFSRDNAKNTVYLQMNSLLPED | | ID NO: 1471 | YADSVQG- | SYKV-SEQ ID NO: | |
| | | AAVYYCAAAPTSFATTAYSSSNSYKVWGQGTQVTVSS-SEQ ID NO: | | | SEQ ID NO: | 1473 | |
| | | 335 | | | 1472 | | |
| 322 | 336 | EVQLVESGGGLVQAGGSLRLSCAASGRTLSRYAMGWFRQAPGKE | 1_c | RYAMG- | ANSWGGDTY | APTSFATTAYSSSN | 1 |
| | | REFVTANSWGGDTYYADSVQGRFTFSRDNAKNTVYLQMNSLQPED | | SEQ ID NO: | YADSVQG- | SYAY-SEQ ID NO: | |
| | | TAVYYCAAAPTSFATTAYSSSNSYAYWGQGTQVTVSS-SEQ ID NO: | | 1474 | SEQ ID NO: | 1476 | |
| | | 336 | | | 1475 | | |
| 323 | 337 | QVQLVESGGGWVQVGESLRLSCAPSGRTFVSGIMGWFRQAPGKE | 22_c | SGIMG-SEQ | RIILNNNSTRY | RDRYGSGNSLSPS | 6 |
| | | REFVARIILNNNSTRYTDSVKGRFTISRDSAKDTMYLQMNTLRPEDT | | ID NO: 1477 | TDSVKG-SEQ | AYDY-SEQ ID NO: | |
| | | AVYYCAARDRYGSGNSLSPSAYDYWGQGTQVTVSS-SEQ ID NO: | | | ID NO: 1478 | 1479 | |
| | | 337 | | | | | |
| 328 | 338 | QVQLVESGGGLVQAGGSLRLSCAASGRTLSRYAMGWFRQAPGKE | 4_c | RYAMG- | ANSWGGDTY | APTSFATTAYSSSN | 1 |
| | | REFVTANSWGGDTYYADSVQGRFTFSRDNAKNTVYLQMNSLQPED | | SEQ ID NO: | YADSVQG- | SYAY-SEQ ID NO: | |
| | | TAVYYCAAAPTSFATTAYSSSNSYAYWGQGTQVTVSS-SEQ ID NO: | | 1480 | SEQ ID NO: | 1482 | |
| | | 338 | | | 1481 | | |
| 329 | 339 | QVQLVESGGGLVQPGGSLRLSCAASGRTLSRYAMGWFRQAPGKE | 23_c | RYAMG- | ANSWGGDTY | APTSFATTAYSSSN | 1 |
| | | REFVTANSWGGDTYYADSVQGRFTFSRDNAKNTVYLQMNSLQPED | | SEQ ID NO: | YADSVQG- | SYAY-SEQ ID NO: | |
| | | TAVYYCAAAPTSFATTAYSSSNSYAYWGQGTQVTVSS-SEQ ID NO: | | 1483 | SEQ ID NO: | 1485 | |
| | | 339 | | | 1484 | | |
| 330 | 340 | QLQLVESGGGWVQVGESLRLSCVPSGRTFVSGIMGWFRQAPGKE | 24_c | SGIMG-SEQ | RIILNNNSTRY | RDRYGSGNSLSPS | 6 |
| | | REFVARIILNNNSTRYTDSVKGRFTISRDSAKNTMYLQMNTLRPEDT | | ID NO: 1486 | TDSVKG-SEQ | AYDY-SEQ ID NO: | |
| | | AVYYCAARDRYGSGNSLSPSAYDYWGQGTQVTVSS-SEQ ID NO: | | | ID NO: 1487 | 1488 | |
| | | 340 | | | | | |
| 331 | 341 | EVQLVESGGGLVQAGGSLRLSCAASGRTLSRYAMGWFRQAPGKE | 1_c | RYAMG- | ANSWGGDTY | APTSFATTAYSSSN | 1 |
| | | REFVTANSWGGDTYYADSVQGRFTFSRDNAKNTVYLQMNSLQPED | | SEQ ID NO: | YADSVQG- | SYAY-SEQ ID NO: | |
| | | TAVYYCAAAPTSFATTAYSSSNSYAYWGQGTQVTVSS-SEQ ID NO: | | 1489 | SEQ ID NO: | 1491 | |
| | | 341 | | | 1490 | | |
| 332 | 342 | QVQLVESGGGLVQAGGSLRLSCAASGRALSRLAMGWFRQAPGKE | 25_c | RLAMG- | ASSWGDDTFY | APTSFATTAYSSSN | 1 |
| | | REFVVASSWGDDTFYADSVKGRFTFSRDNAKNTVYLQMNSLQPGD | | SEQ ID NO: | ADSVKG-SEQ | SYAY-SEQ ID NO: | |
| | | TAVYYCAAAPTSFATTAYSSSNSYAYWGQGTQVTVSS-SEQ ID NO: | | 1492 | ID NO: 1493 | 1494 | |
| | | 342 | | | | | |
| 334 | 343 | QVQLVESGGGLVQAGGSLRLSCAASGRTLSRYAMGWFRQAPGKE | 4_c | RYAMG- | ANSWGGDTY | APTSFATTAYSSSN | 1 |
| | | REFVTANSWGGDTYYADSVQGRFTFSRDNAKNTVYLQMNSLQPED | | SEQ ID NO: | YADSVQG- | SYAY-SEQ ID NO: | |
| | | TAVYYCAAAPTSFATTAYSSSNSYAYWGQGTQVTVSS-SEQ ID NO: | | 1495 | SEQ ID NO: | 1497 | |
| | | 343 | | | 1496 | | |
| 337 | 344 | QLQLVESGGGWVQVGESLRLSCAPSGRTFVSGIMGWFRQAPGKE | 26_c | SGIMG-SEQ | RIILNNNSTRYI | RDRYGSGNSLSPS | 6 |
| | | REFVARIILNNNSTRYIDSVKGRFTISRDSAKNTMYLQMDSLRPEDTA | | ID NO: 1498 | DSVKG-SEQ | AYDY-SEQ ID NO: | |
| | | VYYCAARDRYGSGNSLSPSAYDYWGQGTQVTVSS-SEQ ID NO: | | | ID NO: 1499 | 1500 | |
| | | 344 | | | | | |
| 338 | 345 | EVQLVESGGGWVQVGESLRLSCAPSGRTFVSGIMGWFRQTPGKE | 27_c | SGIMG-SEQ | RIILNNNSTRY | RDRYGSGNSLSPS | 6 |
| | | REFVARIILNNNSTRYTDSVKGRFTISRDSAKNTLYLQMNTLRPEDTA | | ID NO: 1501 | TDSVKG-SEQ | AYDY-SEQ ID NO: | |
| | | VYYCAARDRYGSGNSLSPSAYDYWGQGTQVTVSS-SEQ ID NO: | | | ID NO: 1502 | 1503 | |
| | | 345 | | | | | |
| 341 | 346 | QVQLVESGGGLVQAGGSLRLSCAASGRTLSRYAMGWFRQAPGKE | 28_c | RYAMG- | ATSWGGDTY | APTSFATTAYSSSN | 1 |
| | | RDFVAATSWGGDTYYADSVEGRFTFSRDNAKNAVYLQMNSLQPED | | SEQ ID NO: | YADSVEG- | SYAY-SEQ ID NO: | |
| | | TAVYYCAAAPTSFATTAYSSSNSYAYWGQGTQVTVSS-SEQ ID NO: | | 1504 | SEQ ID NO: | 1506 | |
| | | 346 | | | 1505 | | |
| 342 | 347 | EVQLVESGGGLVQAGGSLRLSCAASGRTLSRYAMGWFRQAPGKE | 1_c | RYAMG- | ANSWGGDTY | APTSFATTAYSSSN | 1 |
| | | REFVTANSWGGDTYYADSVQGRFTFSRDNAKNTVYLQMNSLQPED | | SEQ ID NO: | YADSVQG- | SYAY-SEQ ID NO: | |
| | | TAVYYCAAAPTSFATTAYSSSNSYAYWGQGTQVTVSS-SEQ ID NO: | | 1507 | SEQ ID NO: | 1509 | |
| | | 347 | | | 1508 | | |
| 343 | 348 | QVQLVESGGGWVQVGESLRLSCAPSGRTFVSGIMGWFRQAPGKE | 29_c | SGIMG-SEQ | RIILNNNSTRY | RDRYGSGNSLSPS | 6 |
| | | REFVARIILNNNSTRYTDSVKGRFTISRDSAKNTMYLQMNTLRPEDT | | ID NO: 1510 | TDSVKG-SEQ | AYDY-SEQ ID NO: | |
| | | AVYYCAARDRYGSGNSLSPSAYDYWGQGTQVTVSS-SEQ ID NO: | | | ID NO: 1511 | 1512 | |
| | | 348 | | | | | |
| 344 | 349 | QLQLVESGGGLVQAGGSLRLSCAASGRTLSRYAMGWFRQAPGKE | 30_c | RYAMG- | ANSWGGDTY | APTSFATTAYSSSN | 1 |
| | | REFVTANSWGGDTYYADSVQGRFTFSRDNAKNTVYLQMNSLQPED | | SEQ ID NO: | YADSVQG- | SYAY-SEQ ID NO: | |
| | | TAVYYCAAAPTSFATTAYSSSNSYAYWGQGTQVTVSS-SEQ ID NO: | | 1513 | SEQ ID NO: | 1515 | |
| | | 349 | | | 1514 | | |
| 346 | 350 | QVQLVESGGGLVQAGGSLRLSCVASGRTLSRYAMGWFRQAPGKE | 32_c | RYAMG- | ANSWGGDTY | APTSFATTAYSSSN | 1 |
| | | REFVTANSWGGDTYYADSVQGRFTFSRDNAKNTVYLQMNSLQPED | | SEQ ID NO: | YADSVQG- | SYAY-SEQ ID NO: | |
| | | TAVYYCAAAPTSFATTAYSSSNSYAYWGQGTQVTVSS-SEQ ID NO: | | 1516 | SEQ ID NO: | 1518 | |
| | | 350 | | | 1517 | | |
| 348 | 351 | QVQLVESGGGLVQAGESLRLSCAASGPTASRVAVAWFRQVPGKER | 18_c | RVAVA-SEQ | VVNRPGTMTK | DSVPYGRPYYFQTS | 3 |
| | | EFVAVVNRPGTMTKYADSVKGRFTISRDSAKNTVYLQMNSLKPEDT | | ID NO: 1519 | YADSVKG- | AGNYDY-SEQ ID | |
| | | AVYYCAADSVPYGRPYYFQTSAGNYDYWGQGTQVTVSS-SEQ ID | | | SEQ ID NO: | NO: 1521 | |
| | | NO: 351 | | | 1520 | | |
| 349 | 352 | QVQLVESGGGLVQAGGSLRLSCAASGRTLSRYAMGWFRQAPGKE | 4_c | RYAMG- | ANSWGGDTY | APTSFATTAYSSSN | 1 |
| | | REFVTANSWGGDTYYADSVQGRFTFSRDNAKNTVYLQMNSLQPED | | SEQ ID NO: | YADSVQG- | SYAY-SEQ ID NO: | |
| | | TAVYYCAAAPTSFATTAYSSSNSYAYWGQGTQVTVSS-SEQ ID NO: | | 1522 | SEQ ID NO: | 1524 | |
| | | 352 | | | 1523 | | |
| 351 | 353 | QVQLVESGGGWVQVGESLRLSCAPSGRTFVSGIMGWFRQAPGKE | 33_c | SGIMG-SEQ | RIILNNNSTRY | RDRYGSGNSLSPS | 6 |
| | | REFVARIILNNNSTRYTDSVKGRFTISRDSAKNTMYLQMDSLRPEDT | | ID NO: 1525 | TDSVKG-SEQ | AYDY-SEQ ID NO: | |
| | | AVYYCAARDRYGSGNSLSPSAYDYWGQGTQVTVSS-SEQ ID NO: | | | ID NO: 1526 | 1527 | |
| | | 353 | | | | | |
| 352 | 354 | EVQLVESGGGLVQAGESLRLSCAASGPTASRVAVAWFRQVPGKER | 34_c | RVAVA-SEQ | VVNRPGTMTK | DSVPYGRPYYFQTS | 3 |
| | | EFVAVVNRPGTMTKYADSVKGRFTISRDSAKNTVYLQMNSLKPEDT | | ID NO: 1528 | YADSVKG- | AGNYDY-SEQ ID | |
| | | AVYYCAADSVPYGRPYYFQTSAGNYDYWGQGTQVTVSS-SEQ ID | | | SEQ ID NO: | NO: 1530 | |
| | | NO: 354 | | | 1529 | | |
| 353 | 355 | QVQLVESGGGLVQAGGSLRLSCAASGRTFGAVAVGWFRQVPGKE | 35_c | AVAVG-SEQ | AINRNGSATK | DSLPYGRPYYFQTS | 3 |
| | | REFVAAINRNGSATKYADSAKGRFTISRDNAESPVYLQMNSLKPEDT | | ID NO: 1531 | YADSAKG- | AGEYDY-SEQ ID | |
| | | AIYYCAADSLPYGRPYYFQTSAGEYDYWGQGTQVTVSS-SEQ ID | | | SEQ ID NO: | NO: 1533 | |
| | | NO: 355 | | | 1532 | | |
| 354 | 356 | QVQLVESGGGLVQAGGSLRLSCAASGRTLSRYAMGWFRQAPGKE | 4_c | RYAMG- | ANSWGGDTY | APTSFATTAYSSSN | 1 |
| | | REFVTANSWGGDTYYADSVQGRFTFSRDNAKNTVYLQMNSLQPED | | SEQ ID NO: | YADSVQG- | SYAY-SEQ ID NO: | |
| | | TAVYYCAAAPTSFATTAYSSSNSYAYWGQGTQVTVSS-SEQ ID NO: | | 1534 | SEQ ID NO: | 1536 | |
| | | 356 | | | 1535 | | |
| 356 | 357 | QVQLVESGGGWVQVGESLRLSCAPSGRTFVRGIMGWFRQAPGKE | 37_c | RGIMG-SEQ | RIILNSNSTRYI | RDRYGSGNSLSPS | 6 |
| | | REFVARIILNSNSTRYIDSVKGRFTISRDSAKNTMYLQMNSLRPEDTA | | ID NO: 1537 | DSVKG-SEQ | AYDY-SEQ ID NO: | |
| | | VYYCAARDRYGSGNSLSPSAYDYWGQGTQVTVSS-SEQ ID NO: | | | ID NO: 1538 | 1539 | |
| | | 357 | | | | | |
| 357 | 358 | QVQLVESGGGLVQAGGSLRLSCAASGRTLSRYAMGWFRQAPGKE | 38_c | RYAMG- | ANSWGGDTY | APTSFATTAYSSSN | 1 |
| | | REFVTANSWGGDTYYADSVQGRSTFSRDNAKNTVYLQMNSLQPED | | SEQ ID NO: | YADSVQG- | SYAY-SEQ ID NO: | |
| | | TAVYYCAAAPTSFATTAYSSSNSYAYWGQGTQVTVSS-SEQ ID NO: | | 1540 | SEQ ID NO: | 1542 | |
| | | 358 | | | 1541 | | |
| 358 | 359 | QVQLVESGGGWVQVGESLRLSCAPSGRTFVRGIMGWFRQAPGKE | 39_c | RGIMG-SEQ | RIILNNNSTRY | RDRYGSGNSLSPS | 6 |
| | | REFVARIILNNNSTRYTDSVKGRFTISRDSAKNTMWLQMDSLRPEDT | | ID NO: 1543 | TDSVKG-SEQ | AYDY-SEQ ID NO: | |
| | | AVYYCAARDRYGSGNSLSPSAYDYWGQGTQVTVSS-SEQ ID NO: | | | ID NO: 1544 | 1545 | |
| | | 359 | | | | | |
| 359 | 360 | QVQLQESGGGLVQAGGSLRLSCAASGPTFSRVAVGWFRQVPGKE | 40_c | RVAVG-SEQ | AVNRPATMTK | DSVPYGRPYYFQTS | 3 |
| | | REFVAAVNRPATMTKYADSVKGRFTISRDNAKNTVDLQMNSMKPED | | ID NO: 1546 | YADSVKG- | AGEYDY-SEQ ID | |
| | | TAVYYCAADSVPYGRPYYFQTSAGEYDYWGQGTQVTVSS-SEQ ID | | | SEQ ID NO: | NO: 1548 | |
| | | NO: 360 | | | 1547 | | |
| 360 | 361 | EVQLVESGGGWVQVGESLRLSCAPSGRTFVSGIMGWFRQAPGKE | 41_c | SGIMG-SEQ | RIILNNNSTRY | RDRYGSGNSLSPS | 6 |
| | | REFVARIILNNNSTRYTDSVKGRFTISRDSAKNTMYLQMNTLRPEDT | | ID NO: 1549 | TDSVKG-SEQ | AYDY-SEQ ID NO: | |
| | | AVYYCAARDRYGSGNSLSPSAYDYWGQGTQVTVSS-SEQ ID NO: | | | ID NO: 1550 | 1551 | |
| | | 361 | | | | | |
| 361 | 362 | EVQLVESGGGWVQVGESLRLSCAPSGRTFVSGIMGWFRQAPGKE | 41_c | SGIMG-SEQ | RIILNNNSTRY | RDRYGSGNSLSPS | 6 |
| | | REFVARIILNNNSTRYTDSVKGRFTISRDSAKNTMYLQMNTLRPEDT | | ID NO: 1552 | TDSVKG-SEQ | AYDY-SEQ ID NO: | |
| | | AVYYCAARDRYGSGNSLSPSAYDYWGQGTQVTVSS-SEQ ID NO: | | | ID NO: 1553 | 1554 | |
| | | 362 | | | | | |
| 362 | 363 | EVQLVESGGGWVQVGESLRLSCAPSGRTFVSGIMGWFRQAPGKE | 42_c | SGIMG-SEQ | RIILNNNSTRYI | RDRYGSGNSLSPS | 6 |
| | | REFVARIILNNNSTRYIDSVKGRFTISRDSAKNTMYLQMDSLRPEDTA | | ID NO: 1555 | DSVKG-SEQ | AYDY-SEQ ID NO: | |
| | | VYYCAARDRYGSGNSLSPSAYDYWGQGTQVTVSL-SEQ ID NO: | | | ID NO: 1556 | 1557 | |
| | | 363 | | | | | |
| 363 | 364 | QVQLQESGGGWVQVGESLRLSCVPSGRTFVSGIMGWFRQAPGKE | 43_c | SGIMG-SEQ | RIILNNNSTRY | RDRYGSGNSLSPS | 6 |
| | | REFVARIILNNNSTRYTDSVKGRFTISRDSAKNTMYLQMNTLRPEDT | | ID NO: 1558 | TDSVKG-SEQ | AYDY-SEQ ID NO: | |
| | | AVYYCAARDRYGSGNSLSPSAYDYWGQGTQVTVSS-SEQ ID NO: | | | ID NO: 1559 | 1560 | |
| | | 364 | | | | | |
| 364 | 365 | QVQLVESGGGLVQAGGSLRLSCAASGRTLSRYAMGWFRQAPGKE | 4_c | RYAMG- | ANSWGGDTY | APTSFATTAYSSSN | 1 |
| | | REFVTANSWGGDTYYADSVQGRFTFSRDNAKNTVYLQMNSLQPED | | SEQ ID NO: | YADSVQG- | SYAY-SEQ ID NO: | |
| | | TAVYYCAAAPTSFATTAYSSSNSYAYWGQGTQVTVSS-SEQ ID NO: | | 1561 | SEQ ID NO: | 1563 | |
| | | 365 | | | 1562 | | |
| 366 | 366 | QLQLVESGGGWVQVGESLRLSCVPSGRTFVSGIMGWFRQAPGKE | 44_c | SGIMG-SEQ | RIISNNNSTRY | RDRYGSGNSLSPS | 6 |
| | | REFVARIISNNNSTRYTDSVKGRFTISRDSAKNTMYLQMNTLRPEDT | | ID NO: 1564 | TDSVKG-SEQ | AYDY-SEQ ID NO: | |
| | | AVYYCAARDRYGSGNSLSPSAYDYWGQGTQVTVSS-SEQ ID NO: | | | ID NO: 1565 | 1566 | |
| | | 366 | | | | | |
| 367 | 367 | QVQLVESGGGWVQVGESLRLSCAPSGRTFVSGIMGWFRQAPGKE | 45_c | SGIMG-SEQ | RIILNSNSTRY | RDRYGSGNSLSPS | 6 |
| | | REFVARIILNSNSTRYTDSAKGRFTISRDSAKNTMYLQMDSLRPEDT | | ID NO: 1567 | TDSAKG-SEQ | AYDY-SEQ ID NO: | |
| | | AVYYCAARDRYGSGNSLSPSAYDYWGQGTQVTVSS-SEQ ID NO: | | | ID NO: 1568 | 1569 | |
| | | 367 | | | | | |
| 368 | 368 | QVQLVESGGGLVQAGGSLRLSCAPSGRTFVSGIMGWFRQAPGKER | 46_c | SGIMG-SEQ | RIILNNNSTRYI | RDRYGSGNSLSPS | 6 |
| | | EFVARIILNNNSTRYIDSVKGRFTISRDSAKNTMYLQMDSLRPEDTAV | | ID NO: 1570 | DSVKG-SEQ | AYDY-SEQ ID NO: | |
| | | YYCAARDRYGSGNSLSPSAYDYWGQGTQVTVSS-SEQ ID NO: 368 | | | ID NO: 1571 | 1572 | |
| 369 | 369 | QVQLVESGGGLVQAGESLRLSCAASGPTASRVAVAWFRQVPGKER | 18_c | RVAVA-SEQ | VVNRPGTMTK | DSVPYGRPYYFQTS | 3 |
| | | EFVAVVNRPGTMTKYADSVKGRFTISRDSAKNTVYLQMNSLKPEDT | | ID NO: 1573 | YADSVKG- | AGNYDY-SEQ ID | |
| | | AVYYCAADSVPYGRPYYFQTSAGNYDYWGQGTQVTVSS-SEQ ID | | | SEQ ID NO: | NO: 1575 | |
| | | NO: 369 | | | 1574 | | |
| 370 | 370 | EVQLVESGGGWVQVGESLRLSCAPSGRTFVSGIMGWFRQAPGKE | 47_c | SGIMG-SEQ | RIILNNNSTRYI | RDRYGSGNSLSPS | 6 |
| | | REFVARIILNNNSTRYIDSVKGRFTISRDSAKNTMYLQMDSLRPEDTA | | ID NO: 1576 | DSVKG-SEQ | AYDY-SEQ ID NO: | |
| | | VYYCAARDRYGSGNSLSPSAYDYWGQGTQVTVSS-SEQ ID NO: | | | ID NO: 1577 | 1578 | |
| | | 370 | | | | | |
| 371 | 371 | QVQLVESGGGLVQHGGSLRLSCAASGPTFSRVAVGWFRQVPGKE | 48_c | RVAVG-SEQ | VVNRPGSMTK | DSVPYGRPYYFTTS | 3 |
| | | REFVAVVNRPGSMTKYADSVKGRFNISRDTAKNTVYLQMNSLKPED | | ID NO: 1579 | YADSVKG- | AGDYDY-SEQ ID | |
| | | TAVYYCAADSVPYGRPYYFTTSAGDYDYWGQGTQVTVSS-SEQ ID | | | SEQ ID NO: | NO: 1581 | |
| | | NO: 371 | | | 1580 | | |
| 372 | 372 | EVQLVESGGGLVQAGGSLRLSCAASGRTFGAVAVGWFRQVPGKE | 49_c | AVAVG-SEQ | AINRSGSATK | DSLPYGRPYYFQTS | 3 |
| | | REFVAAINRSGSATKYADSVKGRFTISRDNAESPVFLQMNSLKPEDT | | ID NO: 1582 | YADSVKG- | AGEYDY-SEQ ID | |
| | | AVYYCAADSLPYGRPYYFQTSAGEYDYWGQGTQVTVSS-SEQ ID | | | SEQ ID NO: | NO: 1584 | |
| | | NO: 372 | | | 1583 | | |
| 373 | 373 | QVQLVESGGGLVQAGGSLRLSCAASGRTLSRYAMGWFRQAPGKE | 4_c | RYAMG- | ANSWGGDTY | APTSFATTAYSSSN | 1 |
| | | REFVTANSWGGDTYYADSVQGRFTFSRDNAKNTVYLQMNSLQPED | | SEQ ID NO: | YADSVQG- | SYAY-SEQ ID NO: | |
| | | TAVYYCAAAPTSFATTAYSSSNSYAYWGQGTQVTVSS-SEQ ID NO: | | 1585 | SEQ ID NO: | 1587 | |
| | | 373 | | | 1586 | | |
| 374 | 374 | QVQLVESGGGWVQVGESLRLSCAPSGRTFVSGIMGWFRQTPGKE | 50_c | SGIMG-SEQ | RIILNNNSTRY | RDRYGSGNSLSPS | 6 |
| | | REFVARIILNNNSTRYTDSVKGRFTISRDSAKNTLYLQMNTLRPEDTA | | ID NO: 1588 | TDSVKG-SEQ | AYDY-SEQ ID NO: | |
| | | VYYCAARDRYGSGNSLSPSAYDYWGQGTQVTVSS-SEQ ID NO: | | | ID NO: 1589 | 1590 | |
| | | 374 | | | | | |
| 375 | 375 | QVQLVESGGGWVQVGESLRLSCAPSGRTFVSGIMGWFRQAPGEE | 51_c | SGIMG-SEQ | RIILNNNSTRY | RDRYGSGNSLSPS | 6 |
| | | REFVARIILNNNSTRYTDSVKGRFTISRDSAKNTMYLQMNTLRPEDT | | ID NO: 1591 | TDSVKG-SEQ | AYDY-SEQ ID NO: | |
| | | AVYYCAARDRYGSGNSLSPSAYDYWGQGTQVTVSS-SEQ ID NO: | | | ID NO: 1592 | 1593 | |
| | | 375 | | | | | |
| 376 | 376 | QVQLVESGGGWVQVGESPRLSCAPSGRTFVSGIMGWFRQTPGKE | 52_c | SGIMG-SEQ | RIILNNNSTRY | RDRYGSGNSLSPS | 6 |
| | | REFVARIILNNNSTRYTDSVKGRFTISRDSAKNTMYLQMNTLRPEDT | | ID NO: 1594 | TDSVKG-SEQ | AYDY-SEQ ID NO: | |
| | | AVYYCAARDRYGSGNSLSPSAYDYWGQGTQVTVSS-SEQ ID NO: | | | ID NO: 1595 | 1596 | |
| | | 376 | | | | | |
| 378 | 377 | QVQLVESGGGLVQAGGSLRLSCAASGRTLSRYAMGWFRQAPGKE | 4_c | RYAMG- | ANSWGGDTY | APTSFATTAYSSSN | 1 |
| | | REFVTANSWGGDTYYADSVQGRFTFSRDNAKNTVYLQMNSLQPED | | SEQ ID NO: | YADSVQG- | SYAY-SEQ ID NO: | |
| | | TAVYYCAAAPTSFATTAYSSSNSYAYWGQGTQVTVSS-SEQ ID NO: | | 1597 | SEQ ID NO: | 1599 | |
| | | 377 | | | 1598 | | |
| 379 | 378 | EVQLVESGGGWVQVGESLRLSCAPSGRTFVSGIMGWFRQAPGKE | 47_c | SGIMG-SEQ | RIILNNNSTRYI | RDRYGSGNSLSPS | 6 |
| | | REFVARIILNNNSTRYIDSVKGRFTISRDSAKNTMYLQMDSLRPEDTA | | ID NO: 1600 | DSVKG-SEQ | AYDY-SEQ ID NO: | |
| | | VYYCAARDRYGSGNSLSPSAYDYWGQGTQVTVSS-SEQ ID NO: | | | ID NO: 1601 | 1602 | |
| | | 378 | | | | | |
| 380 | 379 | QVQLVESGGGWVQVGKSLRLSCAPSGRTFVSGIMGWFRQAPGKE | 54_c | SGIMG-SEQ | RIILNNNSTRYI | RDRYGSGNSLSPS | 6 |
| | | REFVARIILNNNSTRYIDSVKGRFTISRDSAKNTMYLQMDSLRPEDTA | | ID NO: 1603 | DSVKG-SEQ | AYDY-SEQ ID NO: | |
| | | VYYCAARDRYGSGNSLSPSAYDYWGQGTQVTVSS-SEQ ID NO: | | | ID NO: 1604 | 1605 | |
| | | 379 | | | | | |
| 381 | 380 | QLQLVESGGGWVQVGESLRLSCAPSGRTFASGIMGWFRQAPGKE | 55_c | SGIMG-SEQ | RIILNNNSTRY | RDRYGSGNSLSPS | 6 |
| | | REFVARIILNNNSTRYTDSVKGRFTISRDSAKNTMYLQMNTLRPEDT | | ID NO: 1606 | TDSVKG-SEQ | AYDY-SEQ ID NO: | |
| | | AVYYCAARDRYGSGNSLSPSAYDYWGQGTQVTVSS-SEQ ID NO: | | | ID NO: 1607 | 1608 | |
| | | 380 | | | | | |
| 382 | 381 | QVQLQESGGGWVQVGESLRLSCVPSGRTFVSGIMGWFRQAPGKE | 43_c | SGIMG-SEQ | RIILNNNSTRY | RDRYGSGNSLSPS | 6 |
| | | REFVARIILNNNSTRYTDSVKGRFTISRDSAKNTMYLQMNTLRPEDT | | ID NO: 1609 | TDSVKG-SEQ | AYDY-SEQ ID NO: | |
| | | AVYYCAARDRYGSGNSLSPSAYDYWGQGTQVTVSS-SEQ ID NO: | | | ID NO: 1610 | 1611 | |
| | | 381 | | | | | |
| 577 | 382 | EVQLVESGGGLVQAGDSLRLSCAASGRTLSRYAMGWFRQAPGKE | 56_c | RYAMG- | ANSWGGDTY | APTSFATTAYSSSN | 1 |
| | | REFVTANSWGGDTYYADSVQGRFTFSRDNAKNTVYLQMNSLQPED | | SEQ ID NO: | YADSVQG- | SYAY-SEQ ID NO: | |
| | | TAVYYCAAAPTSFATTAYSSSNSYAYWGQGTQVTVSS-SEQ ID NO: | | 1612 | SEQ ID NO: | 1614 | |
| | | 382 | | | 1613 | | |
| 578 | 383 | QVQLVESGGGLVQAGGSLRLSCAASGRTLSRYAMGWFRQAPGKE | 57_c | RYAMG- | ANSWGGDTY | APTSFATTAYSSSN | 1 |
| | | REFVTANSWGGDTYYADSVQGRFTFTRDNAKNTVYLQMNSLQPED | | SEQ ID NO: | YADSVQG- | SYAY-SEQ ID NO: | |
| | | TAVYYCAAAPTSFATTAYSSSNSYAYWGQGTQVTVSS-SEQ ID NO: | | 1615 | SEQ ID NO: | 1617 | |
| | | 383 | | | 1616 | | |
| 579 | 384 | QVQLVESGGGLVQAGDSLRLSCVASGRTLSRCAMGWFRKAPGKE | 58_c | RCAMG- | ISSWGGDTFY | APTSFATTAYSSSN | 1 |
| | | REYVAISSWGGDTFYEDSVEGRFTFSRDNAKNTVYLQMNSLRPEDT | | SEQ ID NO: | EDSVEG-SEQ | SYAY-SEQ ID NO: | |
| | | AVYYCAAAPTSFATTAYSSSNSYAYWGQGTQVTVSS-SEQ ID NO: | | 1618 | ID NO: 1619 | 1620 | |
| | | 384 | | | | | |
| 580 | 385 | QVQLVESGGGLVQAGGSLRLSCAASGRTLSRYAMGWFRQAPGKE | 59_c | RYAMG- | ANSWGGDTY | APTSFATTAYSSSN | 1 |
| | | REFVAANSWGGDTYYTDSVEGRFTFSRDNAKNAVYLQMNSLQPGD | | SEQ ID NO: | YTDSVEG- | SYSY-SEQ ID NO: | |
| | | TAVYYCAAAPTSFATTAYSSSNSYSYWGQGTQVTVSS-SEQ ID NO: | | 1621 | SEQ ID NO: | 1623 | |
| | | 385 | | | 1622 | | |
| 581 | 386 | QVQLQESGGGLVQAGGSLRLSCAASGRTLSRYAMGWFRQAPGKE | 60_c | RYAMG- | CDSWGGDTF | APTSFATTAYSSSN | 1 |
| | | REFVACDSWGGDTFYADSVEGRFTFSRDNAKNATYLQMNSLQPED | | SEQ ID NO: | YADSVEG- | SYTV-SEQ ID NO: | |
| | | TAVYYCAGAPTSFATTAYSSSNSYTVWGQGTQVTVSL-SEQ ID NO: | | 1624 | SEQ ID NO: | 1626 | |
| | | 386 | | | 1625 | | |
| 582 | 387 | QVQLVESGGGLVQAGGSLRLSCAASGRTLSRYAMGWFRQAPGKE | 4_c | RYAMG- | ANSWGGDTY | APTSFATTAYSSSN | 1 |
| | | REFVTANSWGGDTYYADSVQGRFTFSRDNAKNTVYLQMNSLQPED | | SEQ ID NO: | YADSVQG- | SYAY-SEQ ID NO: | |
| | | TAVYYCAAAPTSFATTAYSSSNSYAYWGQGTQVTVSS-SEQ ID NO: | | 1627 | SEQ ID NO: | 1629 | |
| | | 387 | | | 1628 | | |
| 584 | 388 | QVQLVESGGGLVQAGGSLRLFCATSGRTLSRYAMGWFRQAPGRE | 62_c | RYAMG- | CDSWGGDTF | APTSFATTAYSSSN | 1 |
| | | REFVACDSWGGDTFYADSVKGRFTFSRDSAKNTVYLQMNSLQPED | | SEQ ID NO: | YADSVKG- | SYAY-SEQ ID NO: | |
| | | TAVYYCAAAPTSFATTAYSSSNSYAYWGQGTQVTVSS-SEQ ID NO: | | 1630 | SEQ ID NO: | 1632 | |
| | | 388 | | | 1631 | | |
| 585 | 389 | QVQLVESGGGLVQAGGSLRLSCAASGRALSRLAMGWFRQAPGKE | 63_c | RLAMG- | ASSWGDDTFY | APTSFATTAYSSSN | 1 |
| | | REFVVASSWGDDTFYADSVKGRFTFSRDNAKNTVYLQMNSLQPGD | | SEQ ID NO: | ADSVKG-SEQ | SYAY-SEQ ID NO: | |
| | | TAVYYCAAAPTSFATTAYSSSNSYAYWGQGTQVTASS-SEQ ID NO: | | 1633 | ID NO: 1634 | 1635 | |
| | | 389 | | | | | |
| 586 | 390 | EVQLVESGGGLVQAGGSLRLSCAASGRALSRLAMGWFRQAPGKE | 64_c | RLAMG- | ASSWGDDTFY | APTSFATTAYSSSN | 1 |
| | | REFVVASSWGDDTFYADSVKGRFTFSRDNAKNTVYLQMNSLQPGD | | SEQ ID NO: | ADSVKG-SEQ | SYAY-SEQ ID NO: | |
| | | TAVYYCAAAPTSFATTAYSSSNSYAYWGQGTQVTVSS-SEQ ID NO: | | 1636 | ID NO: 1637 | 1638 | |
| | | 390 | | | | | |
| 587 | 391 | EVQLVESGGGWVQVGESLRLSCAPSGRTFVSGIMGWFRQTPGKE | 10_c | SGIMG-SEQ | RIILNNNSTRY | RDRYGSGNSLSPS | 6 |
| | | REFVARIILNNNSTRYTDSVKGRFTISRDSAKNTMYLQMNTLRPEDT | | ID NO: 1639 | TDSVKG-SEQ | AYDY-SEQ ID NO: | |
| | | AVYYCAARDRYGSGNSLSPSAYDYWGQGTQVTVSS-SEQ ID NO: | | | ID NO: 1640 | 1641 | |
| | | 391 | | | | | |
| 588 | 392 | QVQLQESGGGLVQAGGSLRLSCAASGRALSRLAMGWFRQAPGKE | 65_c | RLAMG- | ASSWGDDTFY | APTSFATTAYSSSN | 1 |
| | | REFVVASSWGDDTFYADSVKGRFTFSRDNAKNTVYLQMNSLQPGD | | SEQ ID NO: | ADSVKG-SEQ | SYAY-SEQ ID NO: | |
| | | TAVYYCAAAPTSFATTAYSSSNSYAYWGQGTQVTVSS-SEQ ID NO: | | 1642 | ID NO: 1643 | 1644 | |
| | | 392 | | | | | |
| 589 | 393 | QVQLVESGGGLVQAGGSLRLSCAASGRALSRLAMGWFRQAPGKE | 25_c | RLAMG- | ASSWGDDTFY | APTSFATTAYSSSN | 1 |
| | | REFVVASSWGDDTFYADSVKGRFTFSRDNAKNTVYLQMNSLQPGD | | SEQ ID NO: | ADSVKG-SEQ | SYAY-SEQ ID NO: | |
| | | TAVYYCAAAPTSFATTAYSSSNSYAYWGQGTQVTVSS-SEQ ID NO: | | 1645 | ID NO: 1646 | 1647 | |
| | | 393 | | | | | |
| 591 | 394 | QVQLVESGGGLVQAGGSLRLSCAASGRTLSRYAMGWFRQAPGKE | 4_c | RYAMG- | ANSWGGDTY | APTSFATTAYSSSN | 1 |
| | | REFVTANSWGGDTYYADSVQGRFTFSRDNAKNTVYLQMNSLQPED | | SEQ ID NO: | YADSVQG- | SYAY-SEQ ID NO: | |
| | | TAVYYCAAAPTSFATTAYSSSNSYAYWGQGTQVTVSS-SEQ ID NO: | | 1648 | SEQ ID NO: | 1650 | |
| | | 394 | | | 1649 | | |
| 592 | 395 | QVQLVESGGGLVQAGGSLRLSCAASGRALSRLAMGWFRQAPGKE | 25_c | RLAMG- | ASSWGDDTFY | APTSFATTAYSSSN | 1 |
| | | REFVVASSWGDDTFYADSVKGRFTFSRDNAKNTVYLQMNSLQPGD | | SEQ ID NO: | ADSVKG-SEQ | SYAY-SEQ ID NO: | |
| | | TAVYYCAAAPTSFATTAYSSSNSYAYWGQGTQVTVSS-SEQ ID NO: | | 1651 | ID NO: 1652 | 1653 | |
| | | 395 | | | | | |
| 593 | 396 | EVQLVESGGGLVQAGGSLRLSCAASGRTLSRYAMGWFRQAPGKE | 67_c | RYAMG- | IDSWGGDTFY | APTSFATTAYSSSN | 1 |
| | | REYVAIDSWGGDTFYADSVEGRFTFSRDNAKNEVYLQMNSLQPED | | SEQ ID NO: | ADSVEG-SEQ | SYRY-SEQ ID NO: | |
| | | TAVYYCAGAPTSFATTAYSSSNSYRYWGQGTQVTVSS-SEQ ID | | 1654 | ID NO: 1655 | 1656 | |
| | | NO: 396 | | | | | |
| 594 | 397 | EVQLVESGGGLVQAGGSLRLSCAASGRALSRLAMGWFRQAPGKE | 64_c | RLAMG- | ASSWGDDTFY | APTSFATTAYSSSN | 1 |
| | | REFVVASSWGDDTFYADSVKGRFTFSRDNAKNTVYLQMNSLQPGD | | SEQ ID NO: | ADSVKG-SEQ | SYAY-SEQ ID NO: | |
| | | TAVYYCAAAPTSFATTAYSSSNSYAYWGQGTQVTVSS-SEQ ID NO: | | 1657 | ID NO: 1658 | 1659 | |
| | | 397 | | | | | |
| 595 | 398 | EVQLVESGGGLVQAGGSLRLSCAASGRTLSRYAMGWFRQAPGKE | 1_c | RYAMG- | ANSWGGDTY | APTSFATTAYSSSN | 1 |
| | | REFVTANSWGGDTYYADSVQGRFTFSRDNAKNTVYLQMNSLQPED | | SEQ ID NO: | YADSVQG- | SYAY-SEQ ID NO: | |
| | | TAVYYCAAAPTSFATTAYSSSNSYAYWGQGTQVTVSS-SEQ ID NO: | | 1660 | SEQ ID NO: | 1662 | |
| | | 398 | | | 1661 | | |
| 596 | 399 | QVQLVESGGGLVQAGGSLRLSCAASGRTLSRYAMGWFRQAPGKE | 4_c | RYAMG- | ANSWGGDTY | APTSFATTAYSSSN | 1 |
| | | REFVTANSWGGDTYYADSVQGRFTFSRDNAKNTVYLQMNSLQPED | | SEQ ID NO: | YADSVQG- | SYAY-SEQ ID NO: | |
| | | TAVYYCAAAPTSFATTAYSSSNSYAYWGQGTQVTVSS-SEQ ID NO: | | 1663 | SEQ ID NO: | 1665 | |
| | | 399 | | | 1664 | | |
| 597 | 400 | QVQLVESGGGLVQAGGSLRLSCAASGRTLSRYAMGWFRQAPGKE | 4_c | RYAMG- | ANSWGGDTY | APTSFATTAYSSSN | 1 |
| | | REFVTANSWGGDTYYADSVQGRFTFSRDNAKNTVYLQMNSLQPED | | SEQ ID NO: | YADSVQG- | SYAY-SEQ ID NO: | |
| | | TAVYYCAAAPTSFATTAYSSSNSYAYWGQGTQVTVSS-SEQ ID NO: | | 1666 | SEQ ID NO: | 1668 | |
| | | 400 | | | 1667 | | |
| 598 | 401 | QVQLVESGGGLVQTGGSLRLSCAASGRTLSRYAMGWFRQAPGKE | 68_c | RYAMG- | ANSWGGDTY | APTSFATTAYSSSN | 1 |
| | | REFVTANSWGGDTYYADSVQGRFTFSRDNAKNTVYLQMNSLQPED | | SEQ ID NO: | YADSVQG- | SYAY-SEQ ID NO: | |
| | | TAVYYCAAAPTSFATTAYSSSNSYAYWGQGTQVTVSS-SEQ ID NO: | | 1669 | SEQ ID NO: | 1671 | |
| | | 401 | | | 1670 | | |
| 599 | 402 | QVQLVESGGGLVQAGGSLRLSCAASGRTLSRYAMGWFRQAPGKE | 4_c | RYAMG- | ANSWGGDTY | APTSFATTAYSSSN | 1 |
| | | REFVTANSWGGDTYYADSVQGRFTFSRDNAKNTVYLQMNSLQPED | | SEQ ID NO: | YADSVQG- | SYAY-SEQ ID NO: | |
| | | TAVYYCAAAPTSFATTAYSSSNSYAYWGQGTQVTVSS-SEQ ID NO: | | 1672 | SEQ ID NO: | 1674 | |
| | | 402 | | | 1673 | | |
| 601 | 403 | QVQLVESGGGLVQAGGSLRLSCAASGRTLSRYAMGWFRQGPGKE | 69_c | RYAMG- | ADSWGGDTY | APTSFATTAYSSSN | 1 |
| | | REFVAADSWGGDTYYDDSVEGRFTFSRDITKNAVYLQMNSLQPED | | SEQ ID NO: | YDDSVEG- | SYAY-SEQ ID NO: | |
| | | TAVYYCAAAPTSFATTAYSSSNSYAYWGQGTQVTVSS-SEQ ID NO: | | 1675 | SEQ ID NO: | 1677 | |
| | | 403 | | | 1676 | | |
| 602 | 404 | EVQLVESGGGLVQAGGSLRLSCAASGRTLSRYAMGWFRQAPGKE | 1_c | RYAMG | ANSWGGDTY | APTSFATTAYSSSN | 1 |
| | | REFVTANSWGGDTYYADSVQGRFTFSRDNAKNTVYLQMNSLQPED | | SEQ ID NO: | YADSVQG- | SYAY-SEQ ID NO: | |
| | | TAVYYCAAAPTSFATTAYSSSNSYAYWGQGTQVTVSS-SEQ ID NO: | | 1678 | SEQ ID NO: | 1680 | |
| | | 404 | | | 1679 | | |
| 603 | 405 | QVQLVESGGGVVQAGGSLRLSCAASGRTLSRYAMGWFRQAPGKE | 70_c | RYAMG- | ANSWGGDTY | APTSFATTAYSSSN | 1 |
| | | REFVTANSWGGDTYYADSVQGRFTFSRDNAKNTVYLQMNSLQPED | | SEQ ID NO: | YADSVQG- | SYAY-SEQ ID NO: | |
| | | TAVYYCAAAPTSFATTAYSSSNSYAYWGQGTQVTVSS-SEQ ID NO: | | 1681 | SEQ ID NO: | 1683 | |
| | | 405 | | | 1682 | | |
| 604 | 406 | EVQLVESGGGLVQAGGSLRLSCAASGRTLSRYAMGWFRQGPGKE | 71_c | RYAMG- | ADSWGGDTY | APTSFATTAYSSSN | 1 |
| | | REFVAADSWGGDTYYDDSVEGRFTFSRDITKNAVYLQMNSLQPED | | SEQ ID | YDDSVEG- | SYAY-SEQ ID NO: | |
| | | TAVYYCAAAPTSFATTAYSSSNSYAYWGQGTQVTVSS-SEQ ID NO: | | NO:1684 | SEQ ID NO: | 1686 | |
| | | 406 | | | 1685 | | |
| 605 | 407 | QVQLVESGGGLVQAGDSLRLSCEASGRTLSRYAMGWFRQAPGKE | 72_c | RYAMG- | ANSWGGDTY | APTSFATTAYSSSN | 1 |
| | | REFVTANSWGGDTYYADSVQGRFTFSRDNAKNTVYLQMNSLQPED | | SEQ ID NO: | YADSVQG- | SYAY-SEQ ID NO: | |
| | | TAVYYCAAAPTSFATTAYSSSNSYAYWGQGTQVTVSS-SEQ ID NO: | | 1687 | SEQ ID NO: | 1689 | |
| | | 407 | | | 1688 | | |
| 606 | 408 | EVQLVESGGGLVQAGGSLRLSCAASGRTLSRYAMGWFRQAPGKE | 1_c | RYAMG- | ANSWGGDTY | APTSFATTAYSSSN | 1 |
| | | REFVTANSWGGDTYYADSVQGRFTFSRDNAKNTVYLQMNSLQPED | | SEQ ID NO: | YADSVQG- | SYAY-SEQ ID NO: | |
| | | TAVYYCAAAPTSFATTAYSSSNSYAYWGQGTQVTVSS-SEQ ID NO: | | 1690 | SEQ ID NO: | 1692 | |
| | | 408 | | | 1691 | | |
| 607 | 409 | EVQLVESGGGLVQAGGSLRLSCAASGRTLSRYAMGWFRQAPGKE | 1_c | RYAMG- | ANSWGGDTY | APTSFATTAYSSSN | 1 |
| | | REFVTANSWGGDTYYADSVQGRFTFSRDNAKNTVYLQMNSLQPED | | SEQ ID NO: | YADSVQG- | SYAY-SEQ ID NO: | |
| | | TAVYYCAAAPTSFATTAYSSSNSYAYWGQGTQVTVSS-SEQ ID NO: | | 1693 | SEQ ID NO: | 1695 | |
| | | 409 | | | 1694 | | |
| 608 | 410 | QVQLVESGGGLVQAGGSLRLSCAASGRTLSRYAMGWFRQAPGKE | 73_c | RYAMG- | AMSWGGDTF | APTSFATTAYSSSN | 1 |
| | | REFVAAMSWGGDTFYADSVEGRFTFSRDNAEIAVYLQMNSLQPED | | SEQ ID NO: | YADSVEG- | SYAY-SEQ ID NO: | |
| | | TAVYYCAAAPTSFATTAYSSSNSYAYWGQGTQVTVSH-SEQ ID NO: | | 1696 | SEQ ID NO: | 1698 | |
| | | 410 | | | 1697 | | |
| 609 | 411 | EVQLVESGGGLVQAGGSLRLSCAASGRTLSRYAMGWFRQAPGKE | 1_c | RYAMG- | ANSWGGDTY | APTSFATTAYSSSN | 1 |
| | | REFVTANSWGGDTYYADSVQGRFTFSRDNAKNTVYLQMNSLQPED | | SEQ ID NO: | YADSVQG- | SYAY-SEQ ID NO: | |
| | | TAVYYCAAAPTSFATTAYSSSNSYAYWGQGTQVTVSS-SEQ ID NO: | | 1699 | SEQ ID NO: | 1701 | |
| | | 411 | | | 1700 | | |
| 610 | 412 | QVQLVESGGGLVQAGGSLRLSCAASGRTLSRYAMGWFRQAPGKE | 4_c | RYAMG- | ANSWGGDTY | APTSFATTAYSSSN | 1 |
| | | REFVTANSWGGDTYYADSVQGRFTFSRDNAKNTVYLQMNSLQPED | | SEQ ID NO: | YADSVQG- | SYAY-SEQ ID NO: | |
| | | TAVYYCAAAPTSFATTAYSSSNSYAYWGQGTQVTVSS-SEQ ID NO: | | 1702 | SEQ ID NO: | 1704 | |
| | | 412 | | | 1703 | | |
| 611 | 413 | EVQLVESGGGLVQPGGSLRLSCAASGRALSRLAMGWFRQAPGKE | 74_c | RLAMG- | ASSWGDDTFY | APTSFATTAYSSSN | 1 |
| | | REFVVASSWGDDTFYADSVKGRFTFSRDNAKNTVYLQMNSLQPGD | | SEQ ID NO: | ADSVKG-SEQ | SYAY-SEQ ID NO: | |
| | | TAVYYCAAAPTSFATTAYSSSNSYAYWGQGTQVTVSS-SEQ ID NO: | | 1705 | ID NO: 1706 | 1707 | |
| | | 413 | | | | | |
| 612 | 414 | QVQLVESGGGLVQAGGSLRLSCAASGRTLSRNAMGWFRQAPGKE | 15_c | RNAMG- | ADSWGGDTF | APTSFATTAYSSSN | 1 |
| | | REFVAADSWGGDTFYADSVEGRFTFSRDNAKNAVYLQMNSLQPED | | SEQ ID NO: | YADSVEG- | SYRY-SEQ ID NO: | |
| | | TAVYYCAGAPTSFATTAYSSSNSYRYWGQGTQVTVSS-SEQ ID | | 1708 | SEQ ID NO: | 1710 | |
| | | NO: 414 | | | 1709 | | |
| 613 | 415 | EVQLVESGGGLVQAGGSLRLSCAASGRTLSRYAMGWFRQAPGKE | 1_c | RYAMG- | ANSWGGDTY | APTSFATTAYSSSN | 1 |
| | | REFVTANSWGGDTYYADSVQGRFTFSRDNAKNTVYLQMNSLQPED | | SEQ ID NO: | YADSVQG- | SYAY-SEQ ID NO: | |
| | | TAVYYCAAAPTSFATTAYSSSNSYAYWGQGTQVTVSS-SEQ ID NO: | | 1711 | SEQ ID NO: | 1713 | |
| | | 415 | | | 1712 | | |
| 614 | 416 | EVQLVESGGGLVQAGGSLRLSCAASGRTLSRYAMGWFRQAPGRE | 75_c | RYAMG- | ANSWGGDTY | APTSFATTAYSSSN | 1 |
| | | REFVTANSWGGDTYYADSVQGRFTFSRDNAKNTVYLQMNSLQPED | | SEQ ID NO: | YADSVQG- | SYAY-SEQ ID NO: | |
| | | TAVYYCAAAPTSFATTAYSSSNSYAYWGQGTQVTVSS-SEQ ID NO: | | 1714 | SEQ ID NO: | 1716 | |
| | | 416 | | | 1715 | | |
| 615 | 417 | QVQLVESGGGLVQAGGSLRLSCAASGRTLSRYAMGWFRQAPGKE | 76_c | RYAMG- | ADSWGGDTY | APTSFATTAYSSSN | 1 |
| | | REFVAADSWGGDTYYADSVEGRFTFSRDNANNAVYLQMNSLQPED | | SEQ ID NO: | YADSVEG- | SYAY-SEQ ID NO: | |
| | | TAVYYCAAAPTSFATTAYSSSNSYAYWGQGTQVTVSS-SEQ ID NO: | | 1717 | SEQ ID NO: | 1719 | |
| | | 417 | | | 1718 | | |
| 616 | 418 | QVQLVESGGGLVQAGGSLRLSCAASGRTLSRYAMGWFRQAPGKE | 59_c | RYAMG- | ANSWGGDTY | APTSFATTAYSSSN | 1 |
| | | REFVAANSWGGDTYYTDSVEGRFTFSRDNAKNAVYLQMNSLQPGD | | SEQ ID NO: | YTDSVEG- | SYSY-SEQ ID NO: | |
| | | TAVYYCAAAPTSFATTAYSSSNSYSYWGQGTQVTVSS-SEQ ID NO: | | 1720 | SEQ ID NO: | 1722 | |
| | | 418 | | | 1721 | | |
| 617 | 419 | QVQLVESGGGLVQPGGSLRLSCAASGRTLSRYAMGWFRQAPGKE | 23_c | RYAMG- | ANSWGGDTY | APTSFATTAYSSSN | 1 |
| | | REFVTANSWGGDTYYADSVQGRFTFSRDNAKNTVYLQMNSLQPED | | SEQ ID NO: | YADSVQG- | SYAY-SEQ ID NO: | |
| | | TAVYYCAAAPTSFATTAYSSSNSYAYWGQGTQVTVSS-SEQ ID NO: | | 1723 | SEQ ID NO: | 1725 | |
| | | 419 | | | 1724 | | |
| 618 | 420 | EVQLVESGGGLVQAGGSLRLSCAASGRTLSRYAMGWFRQAPGKE | 1_c | RYAMG- | ANSWGGDTY | APTSFATTAYSSSN | 1 |
| | | REFVTANSWGGDTYYADSVQGRFTFSRDNAKNTVYLQMNSLQPED | | SEQ ID NO: | YADSVQG- | SYAY-SEQ ID NO: | |
| | | TAVYYCAAAPTSFATTAYSSSNSYAYWGQGTQVTVSS-SEQ ID NO: | | 1726 | SEQ ID NO: | 1728 | |
| | | 420 | | | 1727 | | |
| 619 | 421 | QVQLVESGGGLVQAGGSLRLSCAASGRTLSRYAMGWFRQAPGKE | 77_c | RYAMG- | ANSWGGDTY | APTSFATTAYSSSN | 1 |
| | | REFVTANSWGGDTYYADSVQGRFTFSRDNAENTVYLQMNSLQPED | | SEQ ID NO: | YADSVQG- | SYAY-SEQ ID NO: | |
| | | TAVYYCAAAPTSFATTAYSSSNSYAYWGQGTQVTVSS-SEQ ID NO: | | 1729 | SEQ ID NO: | 1731 | |
| | | 421 | | | 1730 | | |
| 620 | 422 | EVQLVESGGGLVQAGGSLRLSCAASGRTLSRYAMGWFRQAPGKE | 1_c | RYAMG- | ANSWGGDTY | APTSFATTAYSSSN | 1 |
| | | REFVTANSWGGDTYYADSVQGRFTFSRDNAKNTVYLQMNSLQPED | | SEQ ID NO: | YADSVQG- | SYAY-SEQ ID NO: | |
| | | TAVYYCAAAPTSFATTAYSSSNSYAYWGQGTQVTVSS-SEQ ID NO: | | 1732 | SEQ ID NO: | 1734 | |
| | | 422 | | | 1733 | | |
| 621 | 423 | QVQLVESGGGLVQAGGSLRLSCAASGRTLSRYAMGWFRQAPGKE | 4_c | RYAMG- | ANSWGGDTY | APTSFATTAYSSSN | 1 |
| | | REFVTANSWGGDTYYADSVQGRFTFSRDNAKNTVYLQMNSLQPED | | SEQ ID NO: | YADSVQG- | SYAY-SEQ ID NO: | |
| | | TAVYYCAAAPTSFATTAYSSSNSYAYWGQGTQVTVSS-SEQ ID NO: | | 1735 | SEQ ID NO: | 1737 | |
| | | 423 | | | 1736 | | |
| 622 | 424 | QVQLVESGGGLVQAGGSLRLSCAASGRALSRLAMGWFRQAPGKE | 25_c | RLAMG- | ASSWGDDTFY | APTSFATTAYSSSN | 1 |
| | | REFVVASSWGDDTFYADSVKGRFTFSRDNAKNTVYLQMNSLQPGD | | SEQ ID NO: | ADSVKG-SEQ | SYAY-SEQ ID NO: | |
| | | TAVYYCAAAPTSFATTAYSSSNSYAYWGQGTQVTVSS-SEQ ID NO: | | 1738 | ID NO: 1739 | 1740 | |
| | | 424 | | | | | |
| 625 | 425 | QVQLVESGGGLVQAGGSLRLSCAASGRTLSRYAMGWFRQAPGKE | 4_c | RYAMG- | ANSWGGDTY | APTSFATTAYSSSN | 1 |
| | | REFVTANSWGGDTYYADSVQGRFTFSRDNAKNTVYLQMNSLQPED | | SEQ ID NO: | YADSVQG- | SYAY-SEQ ID NO: | |
| | | TAVYYCAAAPTSFATTAYSSSNSYAYWGQGTQVTVSS-SEQ ID NO: | | 1741 | SEQ ID NO: | 1743 | |
| | | 425 | | | 1742 | | |
| 626 | 426 | QVQLVESGGGLVQAGGSLRLSCAASGRSLSRYAMGWFRQAPGKE | 78_c | RYAMG- | AISWGGDSFY | APTSFPTTAYSSSN | 1 |
| | | REFVAAISWGGDSFYTDSVEGRFTFSRDNAKNAVYLEMNDLQPEDT | | SEQ ID NO: | TDSVEG-SEQ | SYSY-SEQ ID NO: | |
| | | AVYYCAAAPTSFPTTAYSSSNSYSYWGRGTQVTVSS-SEQ ID NO: | | 1744 | ID NO: 1745 | 1746 | |
| | | 426 | | | | | |
| 627 | 427 | QVQLVESGGGLVQAGGSLRLSCAASGRTLSRYAMGWFRQAPGKE | 4_c | RYAMG- | ANSWGGDTY | APTSFATTAYSSSN | 1 |
| | | REFVTANSWGGDTYYADSVQGRFTFSRDNAKNTVYLQMNSLQPED | | SEQ ID NO: | YADSVQG- | SYAY-SEQ ID NO: | |
| | | TAVYYCAAAPTSFATTAYSSSNSYAYWGQGTQVTVSS-SEQ ID NO: | | 1747 | SEQ ID NO: | 1749 | |
| | | 427 | | | 1748 | | |
| 629 | 428 | EVQLVESGGGLVQAGGSLRLSCAASGRTLSRYAMGWFRQAPGSE | 79_c | RYAMG- | ASSWGGDTF | APTSFPTTAYSSSN | 1 |
| | | REFVAASSWGGDTFYADSVEGRFTFSRDNAKNAVYLQMNSLQPED | | SEQ ID NO: | YADSVEG- | SYAY-SEQ ID NO: | |
| | | TAAYYCAAAPTSFPTTAYSSSNSYAYWGQGTQVTVSS-SEQ ID NO: | | 1750 | SEQ ID NO: | 1752 | |
| | | 428 | | | 1751 | | |
| 630 | 429 | EVQLVESGGGLVQAGGSLRLSCAASGRTLSRYAMGWFRQAPGKE | 1_c | RYAMG- | ANSWGGDTY | APTSFATTAYSSSN | 1 |
| | | REFVTANSWGGDTYYADSVQGRFTFSRDNAKNTVYLQMNSLQPED | | SEQ ID NO: | YADSVQG- | SYAY-SEQ ID NO: | |
| | | TAVYYCAAAPTSFATTAYSSSNSYAYWGQGTQVTVSS-SEQ ID NO: | | 1753 | SEQ ID NO: | 1755 | |
| | | 429 | | | 1754 | | |
| 631 | 430 | QVQLVESGGGLVQAGGSLRLSCAASGRTLSRYAMGWFRQAPGKE | 4_c | RYAMG- | ANSWGGDTY | APTSFATTAYSSSN | 1 |
| | | REFVTANSWGGDTYYADSVQGRFTFSRDNAKNTVYLQMNSLQPED | | SEQ ID NO: | YADSVQG- | SYAY-SEQ ID NO: | |
| | | TAVYYCAAAPTSFATTAYSSSNSYAYWGQGTQVTVSS-SEQ ID NO: | | 1756 | SEQ ID NO: | 1758 | |
| | | 430 | | | 1757 | | |
| 632 | 431 | QVQLVESGGGLVQAGDSLRLSCAASGRTLSRYAMGWFRQAPGKE | 80_c | RYAMG- | ATSWGGDSY | APTSFATTAYSSSN | 1 |
| | | REFVAATSWGGDSYYADSVEGRFTFSRDNAKNAVYLQMNSLQPED | | SEQ ID NO: | YADSVEG- | SYAN-SEQ ID NO: | |
| | | TAVYYCAAAPTSFATTAYSSSNSYANWGQGTQVTVSS-SEQ ID NO: | | 1759 | SEQ ID NO: | 1761 | |
| | | 431 | | | 1760 | | |
| 633 | 432 | QVQLVESGGGLVQAGGSLRLSCAASGRTLSRYAMGWFRQAPGKE | 4_c | RYAMG- | ANSWGGDTY | APTSFATTAYSSSN | 1 |
| | | REFVTANSWGGDTYYADSVQGRFTFSRDNAKNTVYLQMNSLQPED | | SEQ ID NO: | YADSVQG- | SYAY-SEQ ID NO: | |
| | | TAVYYCAAAPTSFATTAYSSSNSYAYWGQGTQVTVSS-SEQ ID NO: | | 1762 | SEQ ID NO: | 1764 | |
| | | 432 | | | 1763 | | |
| 634 | 433 | EVQLVESGGGSVQPGGSLRLSCAASGRTLSRYAMGWFRQAPGKE | 81_c | RYAMG- | ANSWGGDTY | APTSFATTAYSSSN | 1 |
| | | REFVTANSWGGDTYYADSVQGRFTFSRDNAKNTVYLQMNSLQPED | | SEQ ID NO: | YADSVQG- | SYAY-SEQ ID NO: | |
| | | TAVYYCAAAPTSFATTAYSSSNSYAYWGQGTQVTVSS-SEQ ID NO: | | 1765 | SEQ ID NO: | 1767 | |
| | | 433 | | | 1766 | | |
| 635 | 434 | QVQLVESGGGLVQAGGSLRLSCAASGRTLSRYAMGWFRQAPGKE | 4_c | RYAMG- | ANSWGGDTY | APTSFATTAYSSSN | 1 |
| | | REFVTANSWGGDTYYADSVQGRFTFSRDNAKNTVYLQMNSLQPED | | SEQ ID NO: | YADSVQG- | SYAY-SEQ ID NO: | |
| | | TAVYYCAAAPTSFATTAYSSSNSYAYWGQGTQVTVSS-SEQ ID NO: | | 1768 | SEQ ID NO: | 1770 | |
| | | 434 | | | 1769 | | |
| 636 | 435 | QLQLVESGGGLVQAGGSLRLSCAASGRTLSRYAMGWFRQAPGKE | 30_c | RYAMG- | ANSWGGDTY | APTSFATTAYSSSN | 1 |
| | | REFVTANSWGGDTYYADSVQGRFTFSRDNAKNTVYLQMNSLQPED | | SEQ ID NO: | YADSVQG- | SYAY-SEQ ID NO: | |
| | | TAVYYCAAAPTSFATTAYSSSNSYAYWGQGTQVTVSS-SEQ ID NO: | | 1771 | SEQ ID NO: | 1773 | |
| | | 435 | | | 1772 | | |
| 637 | 436 | QVQLVESGGGLVQAGGSLRLSCAASGRTLSRYAMGWFRQAPGKE | 82_c | RYAMG- | ADSWGGDTY | APTSFATTAYSSSN | 1 |
| | | REFVAADSWGGDTYYDDSVEGRFTFSRDIAKNAVYLQMNSLQPED | | SEQ ID NO: | YDDSVEG- | SYAY-SEQ ID NO: | |
| | | TAVYYCAAAPTSFATTAYSSSNSYAYWGQGTQVTVSS-SEQ ID NO: | | 1774 | SEQ ID NO: | 1776 | |
| | | 436 | | | 1775 | | |
| 638 | 437 | QVQLVESGGGLVQAGGSLRLSCAASGRTLSRDAMGWFRQAPGKE | 83_c | RDAMG- | ADSWGGDTF | APTSFATTAYSSSN | 1 |
| | | REFVAADSWGGDTFYADSVEGRFTFSRDNAKNAVYLQMNSLQPED | | SEQ ID NO: | YADSVEG- | SYRY-SEQ ID NO: | |
| | | TAVYYCAGAPTSFATTAYSSSNSYRYWGQGTQVTVSS-SEQ ID | | 1777 | SEQ ID NO: | 1779 | |
| | | NO: 437 | | | 1778 | | |
| 639 | 438 | QVQLVESGGGLVQAGGSLRLSCAASGRTLSRYAMGWFRQAPGRE | 84_0 | RYAMG- | ANSWGGDTY | APTSFATTAYSSSN | 1 |
| | | REFVTANSWGGDTYYADSVQGRFTFSRDNAKNTVYLQMSSLQPED | | SEQ ID NO: | YADSVQG- | SYAY-SEQ ID NO: | |
| | | TAVYYCAAAPTSFATTAYSSSNSYAYWGQGTQVTVSS-SEQ ID NO: | | 1780 | SEQ ID NO: | 1782 | |
| | | 438 | | | 1781 | | |
| 640 | 439 | QVQLVESGGGLVQAGGSLRLSCAASGRTLSRYAMGWFRQAPGKE | 4_c | RYAMG- | ANSWGGDTY | APTSFATTAYSSSN | 1 |
| | | REFVTANSWGGDTYYADSVQGRFTFSRDNAKNTVYLQMNSLQPED | | SEQ ID NO: | YADSVQG- | SYAY-SEQ ID NO: | |
| | | TAVYYCAAAPTSFATTAYSSSNSYAYWGQGTQVTVSS-SEQ ID NO: | | 1783 | SEQ ID NO: | 1785 | |
| | | 439 | | | 1784 | | |
| 641 | 440 | QVQLVESGGGLVQAGGSLRLSCAASGRALSRLAMGWFRQAPGKE | 25_c | RLAMG- | ASSWGDDTFY | APTSFATTAYSSSN | 1 |
| | | REFVVASSWGDDTFYADSVKGRFTFSRDNAKNTVYLQMNSLQPGD | | SEQ ID NO: | ADSVKG-SEQ | SYAY-SEQ ID NO: | |
| | | TAVYYCAAAPTSFATTAYSSSNSYAYWGQGTQVTVSS-SEQ ID NO: | | 1786 | ID NO: 1787 | 1788 | |
| | | 440 | | | | | |
| 642 | 441 | QVQLVESGGGLVQAGGSLRLSCAASGRALSRLAMGWFRQAPGKE | 25_c | RLAMG- | ASSWGDDTFY | APTSFATTAYSSSN | 1 |
| | | REFVVASSWGDDTFYADSVKGRFTFSRDNAKNTVYLQMNSLQPGD | | SEQ ID NO: | ADSVKG-SEQ | SYAY-SEQ ID NO: | |
| | | TAVYYCAAAPTSFATTAYSSSNSYAYWGQGTQVTVSS-SEQ ID NO: | | 1789 | ID NO: 1790 | 1791 | |
| | | 441 | | | | | |
| 643 | 442 | QVQLVESGGGLVQAGGSLRLSCAASGRTLSRYAMGWFRQAPGKE | 85_c | RYAMG- | IDSWGGDTFY | APTSFATTAYSSSN | 1 |
| | | REYVAIDSWGGDTFYADSVEGRFTFSRDNAKNEVYLQMNSLQPED | | SEQ ID NO: | ADSVEG-SEQ | SYRY-SEQ ID NO: | |
| | | TAVYYCAGAPTSFATTAYSSSNSYRYWGQGTQVTVSS-SEQ ID | | 1792 | ID NO: 1793 | 1794 | |
| | | NO: 442 | | | | | |
| 644 | 443 | EVQLVESGGGLVQAGGSLRLSCAASGRTLSRYAMGWFRQAPGKE | 1_c | RYAMG- | ANSWGGDTY | APTSFATTAYSSSN | 1 |
| | | REFVTANSWGGDTYYADSVQGRFTFSRDNAKNTVYLQMNSLQPED | | SEQ ID NO: | YADSVQG- | SYAY-SEQ ID NO: | |
| | | TAVYYCAAAPTSFATTAYSSSNSYAYWGQGTQVTVSS-SEQ ID NO: | | 1795 | SEQ ID NO: | 1797 | |
| | | 443 | | | 1796 | | |
| 645 | 444 | QVQLQESGGGLVQAGGSLRLSCAASGRTLSRYAMGWFRQAPGKE | 86_c | RYAMG- | ANSWGGDTY | APTSFATTAYSSSN | 1 |
| | | REFVTANSWGGDTYYADSVQGRFTFSRDNAKNTVYLQMNSLQPED | | SEQ ID NO: | YADSVQG- | SYAY-SEQ ID NO: | |
| | | TAVYYCAAAPTSFATTAYSSSNSYAYWGQGTQVTVSS-SEQ ID NO: | | 1798 | SEQ ID NO: | 1800 | |
| | | 444 | | | 1799 | | |
| 647 | 445 | QVQLQESGGGLVQAGGSLRLSCAASGRTLSRVAMGWFRQAPGKE | 87_c | RVAMG- | ADSWGGDTF | APASFATTAYSSSN | 1 |
| | | REFVAADSWGGDTFYADSVEGRFTFSRDNAKNAVYLQMNSLQPED | | SEQ ID NO: | YADSVEG- | SYSY-SEQ ID NO: | |
| | | TAVYFCAGAPASFATTAYSSSNSYSYWGQGTQVTVSS-SEQ ID | | 1801 | SEQ ID NO: | 1803 | |
| | | NO: 445 | | | 1802 | | |
| 648 | 446 | QVQLVESGGGLVQAGGSLRLSCAASGRTLSRYAMGWFRQAPGKE | 88_c | RYAMG- | ANSWGGDTY | APTSFATTAYSSSN | 1 |
| | | REFVAANSWGGDTYYTDSVEGRFTFSRDNAKNAVYLQMNSLQPED | | SEQ ID NO: | YTDSVEG- | SYTY-SEQ ID NO: | |
| | | TAVYYCAAAPTSFATTAYSSSNSYTYWGQGTQVTVSS-SEQ ID NO: | | 1804 | SEQ ID NO: | 1806 | |
| | | 446 | | | 1805 | | |
| 649 | 447 | QVQLVESGGGLVQAGGSLRLSCAASGRTLSRYAMGWFRQAPGSE | 66_c | RYAMG- | ASSWGGDTF | APTSFPTTAYSSSN | 1 |
| | | REFVAASSWGGDTFYADSVEGRFTFSRDNAKNAVYLQMNSLQPED | | SEQ ID NO: | YADSVEG- | SYAY-SEQ ID NO: | |
| | | TAAYYCAAAPTSFPTTAYSSSNSYAYWGQGTQVTVSS-SEQ ID NO: | | 1807 | SEQ ID NO: | 1809 | |
| | | 447 | | | 1808 | | |
| 650 | 448 | QVQLVESGGGLVQAGGSLRLSCAASGRTLSRYAMGWFRQAPGKE | 89_c | RYAMG- | ADSWGGDTF | APTSFATTAYSSSN | 1 |
| | | REFVAADSWGGDTFYADSVEGRFTFSRDNAKNAAYLQMNSLQPED | | SEQ ID NO: | YADSVEG- | SYRY-SEQ ID NO: | |
| | | TATYYCAGAPTSFATTAYSSSNSYRYWGQGTQVTVSS-SEQ ID | | 1810 | SEQ ID NO: | 1812 | |
| | | NO: 448 | | | 1811 | | |
| 651 | 449 | QVQLVESGGGLVQAGGSLRLSCAASGRSLSRDAMGWFRQAPGKE | 90_c | RDAMG- | VMSWGGDTF | APTSFATTAYSSSN | 1 |
| | | REFVAVMSWGGDTFYTDSVEGRFTFSRDNAKNAVYLEMNDLQPED | | SEQ ID NO: | YTDSVEG- | SYSY-SEQ ID NO: | |
| | | TAVYYCAAAPTSFATTAYSSSNSYSYWGRGTQVTVSS-SEQ ID NO: | | 1813 | SEQ ID NO: | 1815 | |
| | | 449 | | | 1814 | | |
| 652 | 450 | QVQLVESGGGLVQAGGSLRLSCAASGRTLSRYAMGWFRQAPGKE | 82_c | RYAMG- | ADSWGGDTY | APTSFATTAYSSSN | 1 |
| | | REFVAADSWGGDTYYDDSVEGRFTFSRDIAKNAVYLQMNSLQPED | | SEQ ID NO: | YDDSVEG- | SYAY-SEQ ID NO: | |
| | | TAVYYCAAAPTSFATTAYSSSNSYAYWGQGTQVTVSS-SEQ ID NO: | | 1816 | SEQ ID NO: | 1818 | |
| | | 450 | | | 1817 | | |
| 653 | 451 | QVQLVESGGGLVQAGGSLRLSCAASGRTLSRYAMGWFRQAPGKE | 4_c | RYAMG- | ANSWGGDTY | APTSFATTAYSSSN | 1 |
| | | REFVTANSWGGDTYYADSVQGRFTFSRDNAKNTVYLQMNSLQPED | | SEQ ID NO: | YADSVQG- | SYAY-SEQ ID NO: | |
| | | TAVYYCAAAPTSFATTAYSSSNSYAYWGQGTQVTVSS-SEQ ID NO: | | 1819 | SEQ ID NO: | 1821 | |
| | | 451 | | | 1820 | | |
| 654 | 452 | QVQLQESGGGLVQAGGSLRLSCAASGRTLSRYAMGWFRQAPGKE | 60_c | RYAMG- | CDSWGGDTF | APTSFATTAYSSSN | 1 |
| | | REFVACDSWGGDTFYADSVEGRFTFSRDNAKNATYLQMNSLQPED | | SEQ ID NO: | YADSVEG- | SYTV-SEQ ID NO: | |
| | | TAVYYCAGAPTSFATTAYSSSNSYTVWGQGTQVTVSL-SEQ ID NO: | | 1822 | SEQ ID NO: | 1824 | |
| | | 452 | | | 1823 | | |
| 655 | 453 | QVQLVESGGGLVQAGGSLRLSCAASGRTLSRYAMGWFRQAPGKE | 85_c | RYAMG- | IDSWGGDTFY | APTSFATTAYSSSN | 1 |
| | | REYVAIDSWGGDTFYADSVEGRFTFSRDNAKNEVYLQMNSLQPED | | SEQ ID NO: | ADSVEG-SEQ | SYRY-SEQ ID NO: | |
| | | TAVYYCAGAPTSFATTAYSSSNSYRYWGQGTQVTVSS-SEQ ID | | 1825 | ID NO: 1826 | 1827 | |
| | | NO: 453 | | | | | |
| 656 | 454 | EVQLVESGGGLVQAGGSLRLSCAASGRALSRLAMGWFRQAPGKE | 64_c | RLAMG- | ASSWGDDTFY | APTSFATTAYSSSN | 1 |
| | | REFVVASSWGDDTFYADSVKGRFTFSRDNAKNTVYLQMNSLQPGD | | SEQ ID NO: | ADSVKG-SEQ | SYAY-SEQ ID NO: | |
| | | TAVYYCAAAPTSFATTAYSSSNSYAYWGQGTQVTVSS-SEQ ID NO: | | 1828 | ID NO: 1829 | 1830 | |
| | | 454 | | | | | |
| 658 | 455 | QVQLVESGGGLVQAGGSLRLSCAASGRALSRLAMGWFRQAPGKE | 91_c | RLAMG- | ASSWGDDTFY | APTSFATTAYSSSN | 1 |
| | | REFVVASSWGDDTFYADSVEGRFTFSRDNAKSTVYLQMNSLQPGD | | SEQ ID NO: | ADSVEG-SEQ | SYAY-SEQ ID NO: | |
| | | TAVYYCAAAPTSFATTAYSSSNSYAYWGQGTQVTVPS-SEQ ID NO: | | 1831 | ID NO: 1832 | 1833 | |
| | | 455 | | | | | |
| 659 | 456 | QVQLVESGGGLVQAGASLRLSCAASGRTLSRYAMGWFRQAPGKE | 92_c | RYAMG- | ASSWGGDTY | APTSFATTAYSSSN | 1 |
| | | REFVAASSWGGDTYYADSVEGRFTFSRDNAKNAVYLQMNSLQPED | | SEQ ID NO: | YADSVEG- | SYAY-SEQ ID NO: | |
| | | TAVYYCAGAPTSFATTAYSSSNSYAYWGQGTQVTVSS-SEQ ID | | 1834 | SEQ ID NO: | 1836 | |
| | | NO: 456 | | | 1835 | | |
| 661 | 457 | QVQLVESGGGLVQAGGSLRLSCAASGRTLSRYAMGWFRQAPGKE | 4_c | RYAMG- | ANSWGGDTY | APTSFATTAYSSSN | 1 |
| | | REFVTANSWGGDTYYADSVQGRFTFSRDNAKNTVYLQMNSLQPED | | SEQ ID NO: | YADSVQG- | SYAY-SEQ ID NO: | |
| | | TAVYYCAAAPTSFATTAYSSSNSYAYWGQGTQVTVSS-SEQ ID NO: | | 1837 | SEQ ID NO: | 1839 | |
| | | 457 | | | 1838 | | |
| 662 | 458 | QVQLVESGGGLVQAGGSLRLSCAASGRTLSRLAMGWFRQAPGKE | 93_c | RLAMG- | VNSWGGDTF | APTSFATTAYSSSN | 1 |
| | | REFVAVNSWGGDTFYADSVEGRFTYSRDNAKSAVYLQMNSLQPED | | SEQ ID NO: | YADSVEG- | SYAY-SEQ ID NO: | |
| | | TAVYYCAAAPTSFATTAYSSSNSYAYWGQGTQVTVSS-SEQ ID NO: | | 1840 | SEQ ID NO: | 1842 | |
| | | 458 | | | 1841 | | |
| 663 | 459 | QVQLQESGGGLVQAGGSLRLSCAASGRTLSRYAMGWFRQAPGKE | 86_c | RYAMG- | ANSWGGDTY | APTSFATTAYSSSN | 1 |
| | | REFVTANSWGGDTYYADSVQGRFTFSRDNAKNTVYLQMNSLQPED | | SEQ ID NO: | YADSVQG- | SYAY-SEQ ID NO: | |
| | | TAVYYCAAAPTSFATTAYSSSNSYAYWGQGTQVTVSS-SEQ ID NO: | | 1843 | SEQ ID NO: | 1845 | |
| | | 459 | | | 1844 | | |
| 664 | 460 | QVQLVESGGGLVQPGGSLRLSCAASGRTLSRYAMGWFRQAPGKD | 94_c | RYAMG- | ASSWGGDTF | APTSFATTAYSSSN | 1 |
| | | REFVAASSWGGDTFYADSVEGRFTFSRDNAENATYLQMNSLQPED | | SEQ ID NO: | YADSVEG- | SYGS-SEQ ID NO: | |
| | | TAVYYCAAAPTSFATTAYSSSNSYGSWGQGTQVTVSS-SEQ ID | | 1846 | SEQ ID NO: | 1848 | |
| | | NO: 460 | | | 1847 | | |
| 665 | 461 | QVQLQESGGGLVQAGGSLRLSCAASGRTLSRYAMGWFRQAPGSE | 95_c | RYAMG- | ASSWGGDTF | APTSFPTTAYSSSN | 1 |
| | | REFVAASSWGGDTFYADSVEGRFTFSRDNAKNAVYLQMNSLQPED | | SEQ ID NO: | YADSVEG- | SYAY-SEQ ID NO: | |
| | | TAAYYCAAAPTSFPTTAYSSSNSYAYWGQGTQVTVSS-SEQ ID NO: | | 1849 | SEQ ID NO: | 1851 | |
| | | 461 | | | 1850 | | |
| 666 | 462 | EVQLVESGGGLVQAGGSLRLSCAASGRTLSRYAMGWFRQAPGKE | 67_c | RYAMG- | IDSWGGDTFY | APTSFATTAYSSSN | 1 |
| | | REYVAIDSWGGDTFYADSVEGRFTFSRDNAKNEVYLQMNSLQPED | | SEQ ID NO: | ADSVEG-SEQ | SYRY-SEQ ID NO: | |
| | | TAVYYCAGAPTSFATTAYSSSNSYRYWGQGTQVTVSS-SEQ ID | | 1852 | ID NO: 1853 | 1854 | |
| | | NO: 462 | | | | | |
| 667 | 463 | QVQLVESGGGLVQAGGSLRLSCAASGRSLSRDAMGWFRQAPGKE | 90_c | RDAMG- | VMSWGGDTF | APTSFATTAYSSSN | 1 |
| | | REFVAVMSWGGDTFYTDSVEGRFTFSRDNAKNAVYLEMNDLQPED | | SEQ ID NO: | YTDSVEG- | SYSY-SEQ ID NO: | |
| | | TAVYYCAAAPTSFATTAYSSSNSYSYWGRGTQVTVSS-SEQ ID NO: | | 1855 | SEQ ID NO: | 1857 | |
| | | 463 | | | 1856 | | |
| 668 | 464 | QVQLVESGGGLVQAGGSLRLSCAASGRALSRLAMGWFRQAPGKE | 25_c | RLAMG- | ASSWGDDTFY | APTSFATTAYSSSN | 1 |
| | | REFVVASSWGDDTFYADSVKGRFTFSRDNAKNTVYLQMNSLQPGD | | SEQ ID NO: | ADSVKG-SEQ | SYAY-SEQ ID NO: | |
| | | TAVYYCAAAPTSFATTAYSSSNSYAYWGQGTQVTVSS-SEQ ID NO: | | 1858 | ID NO: 1859 | 1860 | |
| | | 464 | | | | | |
| 669 | 465 | QVQLVESGGGLVQAGGSLRLSCAASGRTLSRYAMGWFRQAPGKE | 96_c | RYAMG- | ANSWGGDTY | APTSFATTAYSSSN | 1 |
| | | REFVTANSWGGDTYYTDSVEGRFTFSRDNAKNAVYLQMNSLQPED | | SEQ ID NO: | YTDSVEG- | SYTY-SEQ ID NO: | |
| | | TAVYYCAAAPTSFATTAYSSSNSYTYWGQGTQVTVSS-SEQ ID NO: | | 1861 | SEQ ID NO: | 1863 | |
| | | 465 | | | 1862 | | |
| 670 | 466 | EVQLVESGGGLVQAGDSLRLSCVASGRTLSRCAMGWFRKAPGKER | 97_c | RCAMG- | ISSWGGDTFY | APTSFATTAYSSSN | 1 |
| | | EYVAISSWGGDTFYEDSVEGRFTFSRDNAKNTVYLQMNSLRPEDTA | | SEQ ID NO: | EDSVEG-SEQ | SYAY-SEQ ID NO: | |
| | | VYYCAAAPTSFATTAYSSSNSYAYWGQGTQVTVSS-SEQ ID NO: | | 1864 | ID NO: 1865 | 1866 | |
| | | 466 | | | | | |

TABLE 10

| | | | | | | Fold Max signal |
|---|---|---|---|---|---|---|
| | EC50 (nM) | | fold EC50 | Max signal (% pSTAT5+) | | (% pSTAT5+) |
| | Treg | NK | NK/Treg | Treg | NK | Treg/NK |
| IL-2 | 0.001183 | 0.3298 | 279 | 97 | 34 | 3 |
| DC0003 | 0.01177 | 2.592 | 220 | 95 | 20 | 5 |
| (TsVHH-48) | | | | | | |
| DC00039 | 0.0007609 | 0.03149 | 41 | 46 | 4 | 11 |
| DC00040 | 0.01579 | 0.7013 | 44 | 43 | 4 | 10 |
| DC00041 | <0.0001 | 0.1503 | >1503 | 94 | 17 | 5 |
| DC00042 | 0.0001058 | 0.7626 | 7208 | 94 | 21 | 5 |
| DC00043 | 0.000529 | 0.04251 | 80 | 54 | 3 | 16 |
| DC00044 | <0.0001 | 0.4415 | >4415 | 96 | 20 | 5 |
| DC00045 | 0.0001514 | 0.05733 | 379 | 88 | 7 | 12 |
| DC00046 | N/A | N/A | N/A | 25 | 6 | 4 |
| DC00047 | N/A | N/A | N/A | 0 | 0 | 1 |
| DC00048 | <0.0001 | 0.1762 | >1762 | 95 | 26 | 4 |
| DC00049 | 0.003361 | 0.1979 | 59 | 95 | 27 | 4 |
| DC00050 | 0.001344 | 0.0326 | 24 | 56 | 8 | 7 |
| DC00051 | <0.0001 | 0.1912 | >1912 | 96 | 33 | 3 |
| DC00052 | 0.004034 | 0.08119 | 20 | 79 | 9 | 8 |
| DC00053 | 0.0004882 | 0.05702 | 117 | 84 | 13 | 7 |
| DC00055 | <0.0001 | 0.8888 | >8888 | 97 | 34 | 3 |
| DC00057 | 0.002082 | 0.5485 | 263 | 89 | 19 | 5 |
| DC00058 | 0.002496 | 1.866 | 748 | 97 | 34 | 3 |
| DC00059 | 0.0002523 | 0.04008 | 159 | 86 | 14 | 6 |
| DC00060 | 0.003339 | 0.6452 | 193 | 56 | 8 | 7 |
| DC00061 | 0.004271 | 0.165 | 39 | 44 | 5 | 9 |
| DC00062 | <0.0001 | 0.03074 | >307.4 | 93 | 22 | 4 |
| DC00064 | <0.0001 | 0.1863 | >1863 | 94 | 38 | 2 |
| DC00066 | <0.0001 | 0.1782 | >1782 | 96 | 27 | 4 |
| DC00067 | <0.0001 | 0.2175 | >2175 | 95 | 39 | 2 |
| DC00068 | 0.001892 | 0.09357 | 49 | 83 | 14 | 6 |
| DC00069 | 0.001189 | 0.234 | 197 | 87 | 12 | 7 |
| DC00070 | 0.0004972 | 0.0538 | 108 | 80 | 11 | 7 |

TABLE 11

| | | | | | | Fold Max signal |
|---|---|---|---|---|---|---|
| | EC50 (nM) | | fold EC50 | Max signal (% pSTAT5+) | | (% pSTAT5+) |
| | Treg | NK | NK/Treg | Treg | NK | Treg/NK |
| IL-2 | 0.05135 | 0.399 | 46 | 82.8 | 18.2 | 5 |
| TsVHH-48 | 0.001948 | 1.135 | 583 | 64.1 | 8.26 | 8 |
| DC00060 | 0.002151 | 0.7691 | 358 | 19.8 | 2.49 | 8 |
| DC00068 | 0.0004247 | 0.00127 | 3 | 30 | 3.39 | 9 |
| DC00075 | <0.0001 | 0.003197 | >31.97 | 53.1 | 4.31 | 12 |
| DC00076 | <0.0001 | 2.423 | >24230 | 59.4 | 14 | 4 |
| DC00077 | <0.0001 | 0.0001907 | >1.907 | 58.4 | 7.96 | 7 |
| DC00078 | <0.0001 | 0.1948 | >1948 | 67.8 | 14.1 | 5 |
| DC00079 | <0.0001 | 0.09935 | >993.5 | 62.4 | 7.35 | 8 |
| DC00080 | <0.0001 | 0.006477 | >64.77 | 17.8 | 4.42 | 4 |
| DC00081 | <0.0001 | 0.194 | >1940 | 60.9 | 13.5 | 5 |
| DC00082 | 0.0008481 | 0.02268 | 27 | 4.57 | 2.11 | 2 |
| DC00083 | <0.0001 | 0.4958 | >4958 | 64.1 | 13 | 5 |
| DC00085 | 0.03127 | 0.6626 | 21 | 8.49 | 2.19 | 4 |
| DC00086 | 0.004405 | 0.187 | 42 | 44.1 | 4.9 | 9 |
| DC00087 | N/A | 0.009717 | N/A | 4.37 | 1.4 | 3 |
| DC00090 | <0.0001 | 0.5723 | >5723 | 23.5 | 2.67 | 9 |
| DC00091 | <0.0001 | 0.3069 | >3069 | 67.7 | 14.5 | 5 |
| DC00092 | <0.0001 | N/A | N/A | 26.7 | 4.82 | 6 |
| DC00093 | 0.7354 | 0.07519 | 0 | 66.7 | 11.4 | 6 |

TABLE 12

| | |
|---|---|
| DC00009 | QVQLVESGGGLVQAGGSLTLSCAAPGRTFGTDVVGWFRQAPGKEREFVASISRSGDGIYYDDSVKGRFTISRNNAWNTVNLQMNSLK |
| (SEQ ID NO: 2039) | VEDTAVYYCAAGDGWSTYDYWGQGTQVTVSSGGGGSGGGGGGGGSQVQLVESGGGLVQPGGSLRLSCATSGFTFRNNFMSWVR |
| | QAPGKGLEWVSTISYGGESTTYAESVKGRFTISRDNAKNTLYLQMNNLKPEDTAVYYCAKATSYDSIRSGSRGQGTQVTVSSDKTHTC |
| | PPCPAPEAAGGPSVFLFPPKPKDTLMISRTPEVTCVVVDVSHEDPEVKFNWYVDGVEVHNAKTKPREEQYNSTYRVVSVLTVLHQDW |
| | LNGKEYKCKVSNKALGAPIEKTISKAKGQPREPQVYTLPPSRDELTKNQVSLTCLVKGFYPSDIAVEWESNGQPENNYKTTPPVLDSD |
| | GSFFLYSRLTVDKSRWQQGNVFSCSVMHEALHNHYTQKSLSLSPGK |
| DC00010 | EVQLVESGGGLVQTGGSLRLSCAASGGTFSRDAMAWFRQVPGKEREFVALISWSGATTNYADSVKGRFAISRDNGKNTVYLQMNRL |
| (SEQ ID NO: 2040) | KPADTAIYYCAADRRPMGSRSYFEPTEYDDWGQGTQVTVSSGGGGSGGGGSGGGGSQVQLVESGGGLVQAGGSLTLSCAAPGRTFG |
| | TDVVGWFRQAPGKEREFVASISRSGDGIYYDDSVKGRFTISRNNAWNTVNLQMNSLKVEDTAVYYCAAGDGWSTYDYWGQGTQVT |
| | VSSGGGGSGGGGSGGGGSQVQLVESGGGLVQPGGSLRLSCATSGFTFRNNFMSWVRQAPGKGLEWVSTISYGGESTTYAESVKGRFT |
| | ISRDNAKNTLYLQMNNLKPEDTAVYYCAKATSYDSIRSGSRGQGTQVTVSSDKTHTCPPCPAPEAAGGPSVFLFPPKPKDTLMISRTPE |
| | VTCVVVDVSHEDPEVKFNWYVDGVEVHNAKTKPREEQYNSTYRVVSVLTVLHQDWLNGKEYKCKVSNKALGAPIEKTISKAKGQP |
| | REPQVYTLPPSRDELTKNQVSLTCLVKGFYPSDIAVEWESNGQPENNYKTTPPVLDSDGSFFLYSRLTVDKSRWQQGNVFSCSVMHEA |
| | LHNHYTQKSLSLSPGK |
| DC00011 | EVQLVESGGGLVQTGGSLRLSCAASGGTFSRDAMAWFRQVPGKEREFVALISWSGATTNYADSVKGRFAISRDNGKNTVYLQMNRL |
| (SEQ ID NO: 2041) | KPADTAIYYCAADRRPMGSRSYFEPTEYDDWGQGTQVTVSSGGGGSGGGGSGGGGSQVQLVESGGGLVQPGGSLRLSCATSGFTFRN |
| | NFMSWVRQAPGKGLEWVSTISYGGESTTYAESVKGRFTISRDNAKNTLYLQMNNLKPEDTAVYYCAKATSYDSIRSGSRGQGTQVTV |
| | SSGGGGSGGGGSGGGGSQVQLVESGGGLVQAGGSLTLSCAAPGRTFGTDVVGWFRQAPGKEREFVASISRSGDGIYYDDSVKGRFTIS |
| | RNNAWNTVNLQMNSLKVEDTAVYYCAAGDGWSTYDYWGQGTQVTVSSGGGGSGGGGSGGGGSDKTHTCPPCPAPEAAGGPSVFL |
| | FPPKPKDTLMISRTPEVTCVVVDVSHEDPEVKFNWYVDGVEVHNAKTKPREEQYNSTYRVVSVLTVLHQDWLNGKEYKCKVSNKAL |
| | GAPIEKTISKAKGQPREPQVYTLPPSRDELTKNQVSLTCLVKGFYPSDIAVEWESNGQPENNYKTTPPVLDSDGSFFLYSRLTVDKSRW |
| | QQGNVFSCSVMHEALHNHYTQKSLSLSPGK |
| DC00012 | QVQLVESGGGLVQPGGSLRLSCATSGFTFRNNFMSWVRQAPGKGLEWVSTISYGGESTTYAESVKGRFTISRDNAKNTLYLQMNNLK |
| (SEQ ID NO: 2042) | PEDTAVYYCAKATSYDSIRSGSRGQGTQVTVSSGGGGSGGGGSGGGGSQVQLVESGGGLVQAGGSLTLSCAAPGRTFGTDVVGWFR |
| | QAPGKEREFVASISRSGDGIYYDDSVKGRFTISRNNAWNTVNLQMNSLKVEDTAVYYCAAGDGWSTYDYWGQGTQVTVSSGGGGS |
| | GGGGSGGGGSDKTHTCPPCPAPEAAGGPSVFLFPPKPKDTLMISRTPEVTCVVVDVSHEDPEVKFNWYVDGVEVHNAKTKPREEQYN |
| | STYRVVSVLTVLHQDWLNGKEYKCKVSNKALGAPIEKTISKAKGQPREPQVYTLPPSRDELTKNQVSLTCLVKGFYPSDIAVEWESNG |
| | QPENNYKTTPPVLDSDGSFFLYSRLTVDKSRWQQGNVFSCSVMHEALHNHYTQKSLSLSPGK |
| DC00014 | EVQLVESGGGLVQTGGSLRLSCAASGGTFSRDAMAWFRQVPGKEREFVALISWSGATTNYADSVKGRFAISRDNGKNTVYLQMNRL |
| (SEQ ID NO: 2043) | KPADTAIYYCAADRRPMGSRSYFEPTEYDDWGQGTQVTVSSGGGGSGGGGSGGGGSQVQLVESGGGLVQAGGSLTLSCAAPGRTFG |
| | TDVVGWFRQAPGKEREFVASISRSGDGIYYDDSVKGRFTISRNNAWNTVNLQMNSLKVEDTAVYYCAAGDGWSTYDYWGQGTQVT |
| | VSSGGGGSGGGGSGGGGSDKTHTCPPCPAPEAAGGPSVFLFPPKPKDTLMISRTPEVTCVVVDVSHEDPEVKFNWYVDGVEVHNAKT |
| | KPREEQYNSTYRVVSVLTVLHQDWLNGKEYKCKVSNKALGAPIEKTISKAKGQPREPQVYTLPPSRDELTKNQVSLTCLVKGFYPSDI |
| | AVEWESNGQPENNYKTTPPVLDSDGSFFLYSRLTVDKSRWQQGNVFSCSVMHEALHNHYTQKSLSLSPGK |
| DC00015 | QVQLVESGGGLVQPGGSLRLSCATSGFTFRNNFMSWVRQAPGKGLEWVSTISYGGESTTYAESVKGRFTISRDNAKNTLYLQMNNLK |
| (SEQ ID NO: 2044) | PEDTAVYYCAKATSYDSIRSGSRGQGTQVTVSSGGGGSGGGGSGGGGSQVQLVESGGGLVQAGGSLTLSCAAPGRTFGTDVVGWFR |
| | QAPGKEREFVASISRSGDGIYYDDSVKGRFTISRNNAWNTVNLQMNSLKVEDTAVYYCAAGDGWSTYDYWGQGTQVTVSSGGGGS |
| | GGGGSGGGGSEVQLVESGGGLVQTGGSLRLSCAASGGTFSRDAMAWFRQVPGKEREFVALISWSGATTNYADSVKGRFAISRDNGK |
| | NTVYLQMNRLKPADTAIYYCAADRRPMGSRSYFEPTEYDDWGQGTQVTVSSGGGGSGGGGSGGGGSDKTHTCPPCPAPEAAGGPSV |
| | FLFPPKPKDTLMISRTPEVTCVVVDVSHEDPEVKFNWYVDGVEVHNAKTKPREEQYNSTYRVVSVLTVLHQDWLNGKEYKCKVSNK |
| | ALGAPIEKTISKAKGQPREPQVYTLPPSRDELTKNQVSLTCLVKGFYPSDIAVEWESNGQPENNYKTTPPVLDSDGSFFLYSRLTVDKSR |
| | WQQGNVFSCSVMHEALHNHYTQKSLSLSPGK |
| DC00016 | QVQLVESGGGLVQAGGSLTLSCAAPGRTFGTDVVGWFRQAPGKEREFVASISRSGDGIYYDDSVKGRFTISRNNAWNTVNLQMNSLK |
| (SEQ ID NO: 2045) | VEDTAVYYCAAGDGWSTYDYWGQGTQVTVSSGGGGSGGGGSGGGGSEVQLVESGGGLVQTGGSLRLSCAASGGTFSRDAMAWFR |
| | QVPGKEREFVALISWSGATTNYADSVKGRFAISRDNGKNTVYLQMNRLKPADTAIYYCAADRRPMGSRSYFEPTEYDDWGQGTQVT |
| | VSSGGGGSGGGGSGGGGSDKTHTCPPCPAPEAAGGPSVFLFPPKPKDTLMISRTPEVTCVVVDVSHEDPEVKFNWYVDGVEVHNAKT |
| | KPREEQYNSTYRVVSVLTVLHQDWLNGKEYKCKVSNKALGAPIEKTISKAKGQPREPQVYTLPPSRDELTKNQVSLTCLVKGFYPSDI |
| | AVEWESNGQPENNYKTTPPVLDSDGSFFLYSRLTVDKSRWQQGNVFSCSVMHEALHNHYTQKSLSLSPGK |
| DC00018 | QVQLVESGGGLVQPGGSLRLSCATSGFTFRNNFMSWVRQAPGKGLEWVSTISYGGESTTYAESVKGRFTISRDNAKNTLYLQMNNLK |
| (SEQ ID NO: 2046) | PEDTAVYYCAKATSYDSIRSGSRGQGTQVTVSSGGGGSGGGGSGGGGSQVQLVESGGGLVQPGGSLRLSCATSGFTFRNNFMSWVRQ |
| | APGKGLEWVSTISYGGESTTYAESVKGRFTISRDNAKNTLYLQMNNLKPEDTAVYYCAKATSYDSIRSGSRGQGTQVTVSSDKTHTCP |
| | PCPAPEAAGGPSVFLFPPKPKDTLMISRTPEVTCVVVDVSHEDPEVKFNWYVDGVEVHNAKTKPREEQYNSTYRVVSVLTVLHQDWL |
| | NGKEYKCKVSNKALGAPIEKTISKAKGQPREPQVYTLPPSRDELTKNQVSLTCLVKGFYPSDIAVEWESNGQPENNYKTTPPVLDSDGS |
| | FLLYSKLTVDKSRWQQGNVFSCSVMHEALHNHYTQKSLSLSPGK |
| DC00019 | QVQLVESGGGLVQPGGSLRLSCATSGFTFRNNFMSWVRQAPGKGLEWVSTISYGGESTTYAESVKGRFTISRDNAKNTLYLQMNNLK |
| (SEQ ID NO: 2047) | PEDTAVYYCAKATSYDSIRSGSRGQGTQVTVSSGGGGSGGGGSGGGGSEVQLVESGGGLVQTGGSLRLSCAASGGTFSRDAMAWFR |
| | QVPGKEREFVALISWSGATTNYADSVKGRFAISRDNGKNTVYLQMNRLKPADTAIYYCAADRRPMGSRSYFEPTEYDDWGQGTQVT |
| | VSSGGGGSGGGGSGGGGSQVQLVESGGGLVQAGGSLTLSCAAPGRTFGTDVVGWFRQAPGKEREFVASISRSGDGIYYDDSVKGRFT |
| | ISRNNAWNTVNLQMNSLKVEDTAVYYCAAGDGWSTYDYWGQGTQVTVSSGGGGSGGGGSGGGGSDKTHTCPPCPAPEAAGGPSVF |
| | LFPPKPKDTLMISRTPEVTCVVVDVSHEDPEVKFNWYVDGVEVHNAKTKPREEQYNSTYRVVSVLTVLHQDWLNGKEYKCKVSNKA |
| | LGAPIEKTISKAKGQPREPQVYTLPPSRDELTKNQVSLTCLVKGFYPSDIAVEWESNGQPENNYKTTPPVLDSDGSFFLYSRLTVDKSR |
| | WQQGNVFSCSVMHEALHNHYTQKSLSLSPGK |
| DC00020 | QVQLVESGGGLVQAGGSLTLSCAAPGRTFGTDVVGWFRQAPGKEREFVASISRSGDGIYYDDSVKGRFTISRNNAWNTVNLQMNSLK |
| (SEQ ID NO: 2048) | VEDTAVYYCAAGDGWSTYDYWGQGTQVTVSSGGGGSGGGGSGGGGSEVQLVESGGGLVQTGGSLRLSCAASGGTFSRDAMAWFR |
| | QVPGKEREFVALISWSGATTNYADSVKGRFAISRDNGKNTVYLQMNRLKPADTAIYYCAADRRPMGSRSYFEPTEYDDWGQGTQVT |
| | VSSGGGGSGGGGSGGGGSQVQLVESGGGLVQPGGSLRLSCATSGFTFRNNFMSWVRQAPGKGLEWVSTISYGGESTTYAESVKGRFT |
| | ISRDNAKNTLYLQMNNLKPEDTAVYYCAKATSYDSIRSGSRGQGTQVTVSSDKTHTCPPCPAPEAAGGPSVFLFPPKPKDTLMISRTPE |
| | VTCVVVDVSHEDPEVKFNWYVDGVEVHNAKTKPREEQYNSTYRVVSVLTVLHQDWLNGKEYKCKVSNKALGAPIEKTISKAKGQP |
| | REPQVYTLPPSRDELTKNQVSLTCLVKGFYPSDIAVEWESNGQPENNYKTTPPVLDSDGSFFLYSRLTVDKSRWQQGNVFSCSVMHEA |
| | LHNHYTQKSLSLSPGK |
| DC0021 | QVQLVESGGGLVQAGGSLTLSCAAPGRTFGTDVVGWFRQAPGKEREFVASISRSGDGIYYDDSVKGRFTISRNNAWNTVNLQMNSLK |
| (SEQ ID NO: 2049) | VEDTAVYYCAAGDGWSTYDYWGQGTQVTVSSGGGGSGGGGSGGGGSQVQLVESGGGLVQPGGSLRLSCATSGFTFRNNFMSWVR |
| | QAPGKGLEWVSTISYGGESTTYAESVKGRFTISRDNAKNTLYLQMNNLKPEDTAVYYCAKATSYDSIRSGSRGQGTQVTVSSGGGGS |
| | GGGGSGGGGSEVQLVESGGGLVQTGGSLRLSCAASGGTFSRDAMAWFRQVPGKEREFVALISWSGATTNYADSVKGRFAISRDNGK |
| | NTVYLQMNRLKPADTAIYYCAADRRPMGSRSYFEPTEYDDWGQGTQVTVSSGGGGSGGGGSGGGGSDKTHTCPPCPAPEAAGGPSV |
| | FLFPPKPKDTLMISRTPEVTCVVVDVSHEDPEVKFNWYVDGVEVHNAKTKPREEQYNSTYRVVSVLTVLHQDWLNGKEYKCKVSNK |
| | ALGAPIEKTISKAKGQPREPQVYTLPPSRDELTKNQVSLTCLVKGFYPSDIAVEWESNGQPENNYKTTPPVLDSDGSFFLYSRLTVDKSR |
| | WQQGNVFSCSVMHEALHNHYTQKSLSLSPGK |
| DC00024 | QVQLVESGGGLVQPGGSLRLSCATSGFTFRNNFMSWVRQAPGKGLEWVSTISYGGESTTYAESVKGRFTISRDNAKNTLYLQMNNLK |
| (SEQ ID NO: 2050) | PEDTAVYYCAKATSYDSIRSGSRGQGTQVTVSSGGGGSGGGGSGGGGSEVQLVESGGGLVQTGGSLRLSCAASGGTFSRDAMAWFR |
| | QVPGKEREFVALISWSGATTNYADSVKGRFAISRDNGKNTVYLQMNRLKPADTAIYYCAADRRPMGSRSYFEPTEYDDWGQGTQVT |
| | VSSGGGGSGGGGSGGGGSDKTHTCPPCPAPEAAGGPSVFLFPPKPKDTLMISRTPEVTCVVVDVSHEDPEVKFNWYVDGVEVHNAKT |
| | KPREEQYNSTYRVVSVLTVLHQDWLNGKEYKCKVSNKALGAPIEKTISKAKGQPREPQVYTLPPSRDELTKNQVSLTCLVKGFYPSDI |
| | AVEWESNGQPENNYKTTPPVLDSDGSFLLYSKLTVDKSRWQQGNVFSCSVMHEALHNHYTQKSLSLSPGK |
| DC00026 | EVQLVESGGGLVQTGGSLRLSCAASGGTFSRDAMAWFRQVPGKEREFVALISWSGATTNYADSVKGRFAISRDNGKNTVYLQMNRL |
| (SEQ ID NO: 2051) | KPADTAIYYCAADRRPMGSRSYFEPTEYDDWGQGTQVTVSSGGGGSGGGGSGGGGSQVQLVESGGGLVQPGGSLRLSCATSGFTFRN |
| | NFMSWVRQAPGKGLEWVSTISYGGESTTYAESVKGRFTISRDNAKNTLYLQMNNLKPEDTAVYYCAKATSYDSIRSGSRGQGTQVTV |
| | SSDKTHTCPPCPAPEAAGGPSVFLFPPKPKDTLMISRTPEVTCVVVDVSHEDPEVKFNWYVDGVEVHNAKTKPREEQYNSTYRVVSVL |
| | TVLHQDWLNGKEYKCKVSNKALGAPIEKTISKAKGQPREPQVYTLPPSRDELTKNQVSLTCLVKGFYPSDIAVEWESNGQPENNYKTT |
| | PPVLDSDGSFLLYSKLTVDKSRWQQGNVFSCSVMHEALHNHYTQKSLSLSPGK |
| DC00028 | QVQLVESGGGLVQPGGSLRLSCATSGFTFRNNFMSWVRQAPGKGLEWVSTISYGGESTTYAESVKGRFTISRDNAKNTLYLQMNNLK |
| (SEQ ID NO: 2052) | PEDTAVYYCAKATSYDSIRSGSRGQGTQVTVSSDKTHTCPPCPAPEAAGGPSVFLFPPKPKDTLMISRTPEVTCVVVDVSHEDPEVKFN |
| | WYVDGVEVHNAKTKPREEQYNSTYRVVSVLTVLHQDWLNGKEYKCKVSNKALGAPIEKTISKAKGQPREPQVYTLPPSRDELTKNQ |
| | VSLTCLVKGFYPSDIAVEWESNGQPENNYKTTPPVLDSDGSFLLYSKLTVDKSRWQQGNVFSCSVMHEALHNHYTQKSLSLSPGK |
| DC00071 | QVQLVESGGGLVQAGGSLRLSCAASGIPFDNYAMGWFRQAPGKEREFVAARDLEGIITRYGDSVKGRFTISRGNAKNTVFLQMNSLK |
| (SEQ ID NO: 2053) | PEDTAVYYCAARDGGVVAGSRSSAQYNYWGQGTQVTVSSDKTHTCPPCPAPEAAGGPSVFLFPPKPKDTLMISRTPEVTCVVVDVSH |
| | EDPEVKFNWYVDGVEVHNAKTKPREEQYNSTYRVVSVLTVLHQDWLNGKEYKCKVSNKALGAPIEKTISKAKGQPREPQVYTLPPS |
| | RDELTKNQVSLTCLVKGFYPSDIAVEWESNGQPENNYKTTPPVLDSDGSFLLYSKLTVDKSRWQQGNVFSCSVMHEALHNHYTQKSL |
| | SLSPGK |
| DC00072 | QVQLVESGGGLVQAGGSLRLSCAASGGTFRTRNMGWFRRAPGKEREFVAAVSWNVDNKLYADSVKGRFTISRDNGRNMVYLQMNS |
| (SEQ ID NO: 2054) | LKPEDTAVYYCAADNIPLSSDMRPTATEYDYWGQGTQVTVSSDKTHTCPPCPAPEAAGGPSVFLFPPKPKDTLMISRTPEVTCVVVDV |
| | SHEDPEVKFNWYVDGVEVHNAKTKPREEQYNSTYRVVSVLTVLHQDWLNGKEYKCKVSNKALGAPIEKTISKAKGQPREPQVYTLP |
| | PSRDELTKNQVSLTCLVKGFYPSDIAVEWESNGQPENNYKTTPPVLDSDGSFLLYSKLTVDKSRWQQGNVFSCSVMHEALHNHYTQK |
| | SLSLSPGK |
| DC00073 | EVQLVESGGGLVQAGGSLRLSCAASGGSIYTYNMGWFRQAPGKEREFVAGTLWSGGDSVYADFAKGRFTLSRENAKNTLYLQMNSL |
| (SEQ ID NO: 2055) | KPEDTATYYCAIDPLSLTSDWRVDELSSWGKGTLVTVSSDKTHTCPPCPAPEAAGGPSVFLFPPKPKDTLMISRTPEVTCVVVDVSHED |
| | PEVKFNWYVDGVEVHNAKTKPREEQYNSTYRVVSVLTVLHQDWLNGKEYKCKVSNKALGAPIEKTISKAKGQPREPQVYTLPPSRD |
| | ELTKNQVSLTCLVKGFYPSDIAVEWESNGQPENNYKTTPPVLDSDGSFLLYSKLTVDKSRWQQGNVFSCSVMHEALHNHYTQKSLSL |
| | SPGK |
| DC00074 | QLQLVESGGGLVQAGDSLRLSCAASGFNFGWHAMGWFRQAPGKEREFVATITWTGRDTYYADSVRGRFTISKDNAKDTLFLQMNSL |
| (SEQ ID NO: 2056) | RPDDTGVYYCAKARERATWAYSEDDCDYWGQGTQVTVSSDKTHTCPPCPAPEAAGGPSVFLFPPKPKDTLMISRTPEVTCVVVDVSH |
| | EDPEVKFNWYVDGVEVHNAKTKPREEQYNSTYRVVSVLTVLHQDWLNGKEYKCKVSNKALGAPIEKTISKAKGQPREPQVYTLPPS |
| | RDELTKNQVSLTCLVKGFYPSDIAVEWESNGQPENNYKTTPPVLDSDGSFLLYSKLTVDKSRWQQGNVFSCSVMHEALHNHYTQKSL |
| | SLSPGK |

1. A trispecific binding molecule comprising:
at least one single domain antigen-binding region specific for the IL-2Rα;
at least one single domain antigen-binding region specific for the IL-2Rβ; and
at least one single domain antigen-binding region specific for the γc.

2. The trispecific binding molecule of claim 1 which is a trispecific antibody comprising:
at least one VHH domain specific for the IL-2Rα;
at least one VHH domain specific for the IL-2Rβ; and
at least one VHH domain specific for the γc.

3. The trispecific binding molecule of claim 2, wherein:
(a) the trispecific antibody has higher affinity, avidity, selectivity, efficacy and/or potency for the IL-2Rα/IL-2Rβ/γc receptor complex compared to the IL-2Rβ/γc receptor complex;
(b) the trispecific antibody activates the IL-2Rα/IL-2Rβ/γc receptor complex resulting in phosphorylation of STAT5; and/or
(c) the trispecific antibody preferentially expands Treg cells

4. The trispecific binding molecule of claim 2, wherein the binding molecule is an antibody comprising two heavy chain polypeptides, but not a light chain.

5. The trispecific binding molecule of claim 2, wherein the binding molecule is an antibody comprising two heavy chains wherein:
(a) the antibody has four antigen-binding region;
(b) the antibody has four antigen-binding regions, with two antigen-binding regions on each heavy chain polypeptide;
(c) the antibody has four antigen binding sites, with one antigen-binding region on one heavy chain polypeptide and three antigen-binding regions on the other heavy chain polypeptide;
(d) the antibody has five antigen binding sites, with two antigen-binding regions on one heavy chain polypeptide and three antigen-binding regions on the other heavy chain polypeptide;
(e) the antibody has six antigen-binding regions;
(f) the antibody has six antigen-binding regions, with three antigen binding regions present on each heavy chain polypeptide;
(g) the antibody is symmetrical in the sense that each of the two heavy chain polypeptides is the same;
(h) the antibody is symmetrical in the sense that each of the two heavy chain polypeptides is the same, with each heavy chain comprising two antigen binding regions;
(i) the antibody is symmetrical in the sense that each of the two heavy chain polypeptides is the same, with each heavy chain comprising three antigen binding regions;
or
(j) the antibody is biparatopic comprising two different single domain binding regions that each bind a different epitope of the same IL-2R chain polypeptide.

6. The trispecific binding molecule of claim 2, wherein the binding molecule is an antibody comprising:
(a) an Fc region; or
(b) an Fc region, but no CH1 domain.

7. The trispecific binding molecule of claim 2, wherein the binding molecule is an antibody which is biparatopic for at least one of IL-2Rα, IL-2Rβ, and γc, preferably wherein it is biparatopic for at least IL-2Rα.

8. The trispecific binding molecule of claim 2, wherein the binding molecule is an antibody comprising:
(a) one of the antibody formats 1 to 19 shown in FIG. 12A or FIG. 12B or FIG. 12C either with or without the indicated specific Fc modifications; or
(b) one of the antibody formats 1 to 19 shown in FIG. 12A or FIG. 12B or FIG. 12C with the specific Fc region modifications shown.

9. The trispecific binding molecule of claim 2, where the binding molecule is an antibody comprising a heavy chain modification selected from one or more of:
a) N297A-Asn297Ala which confers Fc silencing;
b) LALA-Leu234Ala/Leu235Ala which decreases binding to Fc receptors;
c) LFLEPS-Leu234Phe/Leu235Glu/Pro331/Ser which decreases binding to Fc receptors;
d) PG-Pro329Gly which decreases binding to C1q;
e) LALA-PG-Leu234Ala/Leu235Ala/Pro329Gly which decreases binding to Fc receptors and C1q;
f) TM-Pro331Ser/Leu234Glu/Leu235Phe—which decreases binding to Fc receptors and C1q;
g) DA—Asp265Ala—which decreases binding to Fc receptors;
h) GRLR—Gly236Arg/Leu328Arg-which decreases binding to Fc receptors;
i) cFAE—K409R/F405L which promote heterodimer formation; and
j) M252Y/S254T/T256E (YTE) which helps extend the half-life of the antibody.

10. The trispecific binding molecule of claim 2, which comprises:
(a) a VHH domain selected from TABLE 3;
(b) a VHH domain specific for the IL-2Rα selected from TABLE 7;
(c) a VHH domain specific for the IL-2Rβ selected from TABLE 8;
(d) a VHH domain specific for the γc selected from TABLE 9;
(e) a VHH domain specific for the IL-2Rα selected from TABLE 3, a VHH domain specific for the IL-2Rβ selected from TABLE 3, and a VHH domain specific for the γc selected from TABLE 3; or
(f) a VHH domain specific for the IL-2Rα selected from TABLE 7, a VHH domain specific for the IL-2Rβ selected from TABLE 8, and a VHH domain specific for the γc selected from TABLE 9.

11. The trispecific binding molecule of claim 2 which comprises:
(a) a set of three CDRs from a VHH domain selected from TABLE 3;
(b) a set of three CDRs from a VHH domain specific for the IL-2Rα selected from TABLE 7;
(c) a set of three CDRs from a VHH domain specific for the IL-2Rβ selected from TABLE 8;
(d) a set of three CDRs from a VHH domain specific for the γc selected from TABLE 9;
(e) a set of three CDRs from a VHH domain specific for the IL-2Rα selected from TABLE 3, a set of three CDRs from a VHH domain specific for the IL-2Rβ selected from TABLE 3, and a set of three CDRs from a VHH domain specific for the γc selected from TABLE 3; or
(f) a set of three CDRs from a VHH domain specific for the IL-2Rα selected from TABLE 7, a set of three CDRs from a VHH domain specific for the IL-2Rβ selected from TABLE 8, and a set of three CDRs from a VHH domain specific for the γc selected from TABLE 9.

12. The trispecific binding molecule of claim 2 which comprises:
(a) a set of three VHH domains as set out in TABLE 5 or the CDRs for a set of three VHH domains as set out in TABLE 5;
(b) a set of the VHH domains from one of the polypeptides in TABLE 12, all of the CDR sets of one of the polypeptides set out in TABLE 12; or
(c) a set of the VHH domains from a pair of the polypeptides in TABLE 12, all of the CDR sets from a pair of the polypeptides set out in TABLE 12, wherein the pair of polypeptides is one of those defined by the pairwise combinations set out in FIG. 12C.

13. The trispecific binding molecule of claim 2, which comprises the geometry and VHH domain sequences, or variants thereof, of one of the antibodies shown in FIG. 12.

14. The trispecific binding molecule of claim 2, which comprises:
(a) the CDRs of one of the binding molecules shown in FIG. 12C or variant CDRs of those CDRs;
(b) the VHH domains of one of the binding molecules shown in FIG. 12 or variant VHH domains;
(c) what is set out in (a) or (b) wherein the CDRs or VHHs domains are in the same order as shown in FIG. 12C, with the binding molecule having the same format as shown in FIG. 12C, but not necessarily the same sequence apart from the CDRs or VHHs, optionally wherein the binding molecule comprises the constant region modifications shown in FIG. 12C;
(d) the CDR sets of one of the polypeptide sequences set out in Table 12 or variants thereof;
(e) the CDR sets from a pair of polypeptides sequences set out in Table 12 or variants thereof, wherein the pair of polypeptides are one of the pairs of polypeptides shown in FIG. 12C;
(f) the VHH domains of one of the polypeptide sequences set out in Table 12 or variants thereof;
(g) the VHH domains from a pair of polypeptides sequences set out in Table 12 or variants thereof, wherein the pair of polypeptides are one of the pairs of polypeptides shown in FIG. 12C;
(h) at least one of the polypeptide sequences set out in Table 12 or variants thereof; or
(i) a pair of the polypeptide sequences set out in Table 12 or variants thereof, wherein the pair of polypeptides are one of the pairs of polypeptides shown in FIG. 12C;

15. The trispecific binding molecule of claim 1 for use as a medicament.

16. The trispecific binding molecule of claim 1 for use in a method of treating or preventing an autoimmune disorder, or an inflammatory disorder,
preferably wherein:
(a) the disorder is graft versus host disease (GvHD), preferably where the antibody is for use in a method where it is administered prior to, at the same time, or after a transplant of a cell, tissue, or organ; or
(b) the disorder is one involving dysfunction or unwanted proliferation of leukocytes, preferably of T cells, more preferably of Teff cells; such disorders may present with an imbalance of Tregs compared to Teff cells;
(c) the disorder is selected from inflammatory bowel disease (such as ulcerative colitis, Crohn's disease, pouchitis or celiac disease), SLE, multiple sclerosis, type 1 diabetes, myasthenia gravis, pemphigus vulgaris, and bullous pemphigoid;
(d) the disorder is selected from SLE, GvHD, psoriasis, autoimmune hepatitis, ulcerative colitis, eczema;
(e) the disorder is one that can be treated by expansion of Tregs; or
(f) the disorder is one involving dysfunction or unwanted deficiency of leukocytes, preferably regulatory T cells; such disorders may present with an imbalance of Tregs compared to Teff cells;
(g) the disorder is one involving reduced numbers, dysfunction or unwanted proliferation of leukocytes, preferably of T cells, more preferably of T reg cells; or
(h) the disorder is one that can benefit from increasing numbers and/or function of Tregs.

17. A method of stimulating cell proliferation comprising contacting a target cell expressing the IL-2Rα/IL-2Rβ/γc receptor complex with a trispecific binding molecule according to claim 1.

18. A pharmaceutical composition comprising a trispecific binding molecule according to claim 1 and a pharmaceutically acceptable carrier.

19. A method of detecting the IL-2Rα/IL-2Rβ/γc receptor complex comprising contacting a test sample with a binding molecule according to claim 1 and detecting binding of the binding molecule to the IL-2Rα/IL-2Rβ/γc receptor complex
preferably wherein the binding molecule is labelled and the binding of the antibody to the IL-2Rα/IL-2Rβ/γc receptor complex is detected via the label.

The application's sequence listing, which the Patent Office published only in electronic form, follows.

SEQUENCE LISTING (2056 sequences)

SEQ ID NO: 1 - protein, 127 aa, synthetic construct
EVQLVESGGGLVQAGGSLRLSCAASGRTFRTHNMGWFRRAPGKEREFVAAISWNVDNTLYADSVKGRFTISRDNGRNMVYLQMNSLKPEDTAVYYCAADNIPLSSDVAATATEYDYWGQGTQVTVSS

SEQ ID NO: 2 - protein, 120 aa, synthetic construct
QVQLVESGGGLVQPGGSLRLSCATSGFTFRNNFMSWVRQAPGKGLEWVSTISYGGESTTYAESVKGRFTISRDNAKNTLYLQMNNLKPEDTAVYYCAKATSYDSIRSGSRGQGTQVTVSS

SEQ ID NO: 3 - protein, 123 aa, synthetic construct
QVQLVESGGGLVQAGGSLRLSCTASGRTLSSYSMAWFRQAADKGREFVTAISSSGVVTHVLDSVKGRFTISRDNAKNTVYLQMNSLQPEDTALYFCAGTASSYSTYEANYNYWGQGTLVTVSS

SEQ ID NO: 4 - protein, 127 aa, synthetic construct
QVQLVESGGGLVQAGGSLRLSCAASGGTFRTRNMGWFRRAPGKEREFVAAVSWNVDNKLYADSVKGRFTISRDNGRNMVYLQMNSLKPEDTAVYYCAADNIPLSSDMRPTATEYDYWGQGTQVTVSS

SEQ ID NO: 5 - protein, 121 aa, synthetic construct
EVQLVESGGGLVQAGGSLRLSCAASIRAFTTWSMAWFRQAPGKEREYVARINVSGSVTYYADFVKGRFTISRDNAKKTMYLEMNNLKPEDTALYYCAADRTGVGTNDYNYWGQGTQVTVSS

SEQ ID NO: 6 - protein, 127 aa, synthetic construct
QVQLQESGGGLVQAGGSLRLSCAASGRTFSSYAMGWFRQAPGKEREFVAVISWNVDNTEYTDSVKGRFTISRDNDKNMVYLQMNSLKPEDTAVYYCAADSIPLSSDMSPTATEYGYWGQGTQVTVSS

SEQ ID NO: 7 - protein, 127 aa, synthetic construct
EVQLVESGGGLVQAGGSLRLSCAASGRAFSMYNMGWFRQAPGKEREFVAATGWSGANTPYADSVKGRFTISRDNTQNTVYLQMNSLKPEDTATYYCAADSIRLRSDVTRIPLEYDYWGQGTQVTVSS

SEQ ID NO: 8 - protein, 120 aa, synthetic construct
QVQLVESGGGLVQPGGSLRLSCATSGFTFSNNFMSWVRQAPGKGLEFVSTISYGGESTTYAEAVKGRFTISRDNAKNTLYLQMNNLKPEDTAIYYCAKATSYTSIRGAPRGQGTQVTVSS

SEQ ID NO: 9 - protein, 125 aa, synthetic construct
EVQLVESGGGLVQAGGSLRLSCAASGGSIYTYNMGWFRQAPGKEREFVAGTLWSGGDSVYADFAKGRFTLSRENAKNTLYLQMNSLKPEDTATYYCAIDPLSLTSDWRVDELSSWGKGTLVTVSS

SEQ ID NO: 10 - protein, 126 aa, synthetic construct
QVQLVESGGGLVQAGGSLRLSCAASGIPFDNYAMGWFRQAPGKEREFVAARDLEGIITRYGDSVKGRFTISRGNAKNTVFLQMNSLKPEDTAVYYCAARDGGVVAGSRSSAQYNYWGQGTQVTVSS

SEQ ID NO: 11 - protein, 130 aa, synthetic construct
QLQLVESGGGLVQAGGSLRLSCAASGLTFEGYAIGWFRQAPGKEREGVSYITGSDGTTYYINSVKGRFTISSDNAKSTVYLQMNTLKPEDTAVYYCAVDRLGSQGRYASAWWRSGDMDLWGKGTQVTVSS

SEQ ID NO: 12 - protein, 130 aa, synthetic construct
QVQLVESGGGLVQAGGSLRLSCAASGFTFDGYAIGWFRQAPGKEREGVSYITGSDGSTYYADSVKGRFTISSNNAKNTVYLHMNSLKPDDAAVYYCAIDRLGSRGAYVPIWWRSSDMDLWGKGTLVTVSS

SEQ ID NO: 13 - protein, 125 aa, synthetic construct
QVQLQESGGGLVQAGDSLRLSCAASGFNFGWHAMGWFRQAPGKEREFVATITWTGRDTYYADSVRGRFTISKDNAKDTLFLQMNSLRPDDTGVYYCAKARERATWAYSEDDCDYWGQGTQVTVSS

SEQ ID NO: 14 - protein, 119 aa, synthetic construct
EVQLVESGGGLVQTGGSLRLSCAASGSQFINDVMGWYRQVPGKQRELVADMDDTGSTEYADSVKGRFTILRDSVKNTAYLQMSNLKPEDTGVYYCKAGLWIKGRHFDYWGQGTQVTVSS

SEQ ID NO: 15 - protein, 126 aa, synthetic construct
QVQLVESGGGSVQPGGSLRLSCAASGFTFSNYAMSWVRQAPGKGLEWVASITGFGRGTDYADSVKGRFTISRDNAEDTLYLQMNSLKPEDTAVYYCAKYSSSTYYPPTPARGRDYRGQGTQVTVSS

SEQ ID NO: 16 - protein, 123 aa, synthetic construct
EVQLVESGGGLVQAGGSLRLSCAASGRAIENYPVGWFRQAPGKEREFVAAITWISGSTLYADSVKGRFTISRDNAKNTVYLQMSSLKPEDTALYYCAAALKTITRGQNDYSYWGQGTQVTVSS

SEQ ID NO: 17 - protein, 116 aa, synthetic construct
QVQLQESGGGLVQAGGSLRLSCVASGSVSSINGMAWYRQGADNQRVLVAAISRVGNTAYGDSVKGRFTISRQNARNTVYLQMNSLKPEDTAVYYCNADSWGGDDYWGQGTQVTVSS

SEQ ID NO: 18 - protein, 125 aa, synthetic construct
QVQLVESGGGLVQPGGSLRLSCAISGGTLDSYGIGWVRQAPGKQREGVSCMSRSDDRTYYADSVKGRFTISKDSAKNTVYLQMTSLKPEDTAVYYCAAVDAYGCSLVQPTTYDFWGLGTQVTVSS

SEQ ID NO: 19 - protein, 127 aa, synthetic construct
EVQLVESGGGLVQTGGSLRLSCAASGGTFSRDAMAWFRQVPGKEREFVALISWSGATTNYADSVKGRFAISRDNGKNTVYLQMNRLKPADTAIYYCAADRRPMGSRSYFEPTEYDDWGQGTQVTVSS

SEQ ID NO: 20 - protein, 123 aa, synthetic construct
EVQLVESGGGLVQAGGSLRLSCAASGRDFSSYAMGWFRQAPGKEREFVVAITWTKRSTDFPDSVKGRFTISRDNAKNTVYLDMNSLKPEDTAVYYCASARGLPVTPLGDIIYWGEGTLVTVSS

SEQ ID NO: 21 - protein, 126 aa, synthetic construct
EVQLVESGGGLVQAGGSLRLSCAASGRTFSINAMGWFRQAPGKEREFVAAISRSGGSTVYVDGVKGRFTISRDNAKNTVYLQMNSLEPEDTAVYYCAATMAVGWTTRWRTADFDSWGQGTQVTVSS

SEQ ID NO: 22 - protein, 126 aa, synthetic construct
EVQLVESGGGLVQAGGSLRLSCAASGSIFSINAMAWFRQVPGMERELVAAISRDGGASVYRDSVKGRFTISRDNSKNTVYLQMNTLKPEDTAIYVCAATRAIGWTARWITTDFDFWGQGTQVTVSS

SEQ ID NO: 23 - protein, 123 aa, synthetic construct
QVQLVESGGGLVQAGGSLRLSCAVSGDVFVRYTMAWFRQAPGKEREFVASVTDSGRTTDYVHSVKGRFTVSRDNAKNTVYLQMNNLKPEDTAVYYCAANTDYFQIKSLDANTWGQGTQVTVSS

SEQ ID NO: 24 - protein, 126 aa, synthetic construct
QVQLVESGGELVQGGASLRLSCAASGRTFSNANMAWFRQAPEKEREFVALITWSSGSTLYADSVKGRFTISRDNARKMVYLQMNSLKPEDTAVYYCAADGPPYSGTYYRYDTYDYWGQGTQVTVSS

SEQ ID NO: 25 - protein, 123 aa, synthetic construct
QVQLVESGGGLVQTGDSLRLSCAASGRSLDTTYIAWFRQAPGKERDFLAYISPRFSHTWYADSVKGRFTISRNIAKRTVDLEMNSLEPEDTAVYYCAAREHSGSTAWEHYDHWGQGTQVTVSS

SEQ ID NO: 26 - protein, 123 aa, synthetic construct
QVQLQESGGGLVQAGGSLRLSCAASGDVFVRYTMAWFRQAPGKEREFVASVTDSGRTTEYVDSVKGRFTVSRDNAKNTAYLQMNNLKPEDTAIYYCAANTDYFQIRSLDLNTWGQGTQVTVSS

SEQ ID NO: 27 - protein, 118 aa, synthetic construct
QVQLVESGGGLVQAGGSLTLSCAAPGRTFGTDVVGWFRQAPGKEREFVASISRSGDGIYYDDSVKGRFTISRNNAWNTVNLQMNSLKVEDTAVYYCAAGDGWSTYDYWGQGTQVTVSS

SEQ ID NO: 28 - protein, 126 aa, synthetic construct
QVQLVESGGGLVQAGGSLRLSCAASGRTLSRYAMGWFRQAPGKEREFVTANSWGGDTYYADSVQGRFTFSRDNAKNTVYLQMNSLQPEDTAVYYCAAAPTSFATTAYSGSNSYAYWGQGTQVTVSS

SEQ ID NO: 29 - protein, 126 aa, synthetic construct
QVQLVESGGGLVQAGGSLRLACVASGLTFDNYYMGWFRQAPGKEREFVAGIIWNGDHTAYADSIKGRFTISRDNAKNTAYLRMNSLKPEDTAVYYCAATFWIERATTPDIGQYAYWGQGTQVTVSS

SEQ ID NO: 30 - protein, 126 aa, synthetic construct
EVQLVESGGGWVQDGGSLRLSCALSGRTFVRGIMGWFRQAPGKEREFVARIIWHINSTRYADSVKGRFTISRDSAKNTMYLQMDSLRPEDTAVYYCAARDRYGSGNSLSPSAYDYWGQGTQVTVSS

SEQ ID NO: 31 - protein, 121 aa, synthetic construct
QVQLVESGGGLVQAGGSLRLSCTGYGGAFTGYALGWFRQAPGKEREFVARINWSGSFTYYASSVKGRFTISRDNAKNTMYLQMNNLKPEDTAVYYCAADNPSTLATDYDNWGQGTQVTVSS

SEQ ID NO: 32 - protein, 129 aa, synthetic construct
QVQLVESGGGLVQAGGSLRLSCAASGRTFGSTAVGWFRQVPGKEREFVSAINRSGSATTYADSVKGRFTISRDNAKNTVYLQMNSLTPEDTGVYYCAADSLPYGRPYYFQRSAGEYDYWGQGTQVTVSS

SEQ ID NO: 33 - protein, 129 aa, synthetic construct
QLQLVESGGGLVQAGGSLRLSCAASGPTFSRVAVGWFRQAPGKEREFVAAVNRPATMTKYADSVKGRFTVSRDNAKNTVDLQMNSMKPEDTAVYYCAADSVPYGRPYYWQTSAGDYDYWGQGTQVTVSS

SEQ ID NO: 34 - protein, 126 aa, synthetic construct
QVQLVESGGGLVQAGSSLRLSCAASGRTLSRLAMGWFRQAPGKEREFVAVNSWGGDTFYADSVEGRFTYSRDNAKSAVYLQMNSLQPEDTAVYYCAAAPTSFATTAYSSSNSYAYWGQGAQVTVSS

SEQ ID NO: 35 - protein, 126 aa, synthetic construct
QVQLQESGGGLVQGGGSLRLSCAASGGIFSSYAMGWFRQAPGKEREFVAAISRSGRSTNYADSVKGRFTISRDNAKSTVYLQMNSLKPEETAVYYCAAGRYYNSAYDPSPGDFGSWGHGTQVTVSS

SEQ ID NO: 36 - protein, 126 aa, synthetic construct
QVQLVESGGGLVQAGGSLRLSCAASGRTLSRYAMGWFRQAPGSEREFVAASSWGGDTFYADSVEGRFTFSRDNAKNAVYLQMNSLQPEDTAAYYCAAAPTSFPTTAYSSSNSYAYWGQGTQVTVSS

SEQ ID NO: 37 - protein, 126 aa, synthetic construct
QVQLVESGGGLVQAGGSLRLSCAASGRTLSRYAMGWFRQAPGKEREYVAIDSWGGDTFYADSVEGRFTFSRDNAKNEVYLQMNSLQPEDTAVYYCAGAPTSFATTAYSSSNSYRYWGQGTQVTVSS

SEQ ID NO: 38 - protein, 126 aa, synthetic construct
QVQLVESGGGLVQAGGSLRLSCAASGRSLSRDAMGWFRQAPGKEREFVAVMSWGGDTFYTDSVEGRFTFSRDNAKNAVYLEMNDLQPEDTAVYYCAAAPTSFATTAYSSSNSYSYWGRGTQVTVSS

SEQ ID NO: 39 - protein, 123 aa, synthetic construct
EVQLVESGGGLVQAGDSLRLSCAASGRSFRNYILAWYRQAPGKEREFLAAISWLDGTLYADSVEDRFTISRDNPKNTVHLQMDNLKPEDTAVYYCAADRGPVRPVLAPDVDYWGQGTQVSVSS

SEQ ID NO: 40 - protein, 123 aa, synthetic construct
EVQLVESGGGWVQAGDSLRLSCAASGRTFRNYVMGWFRQVPGKEREFLSVITSLGGTVYADSVANRFTISRDNPKDTVYLQMDSLKPEDTAVYYCAADRGPARYISASDVDYWGQGTQVTASS

SEQ ID NO: 41 - protein, 127 aa, synthetic construct
QVQLQESGGGLVQAGGSLRLSCAASGRTFRTHNMGWFRRAPGKEREFVAAISWNVDNTLYADSVKGRFTISRDNDRNMVYLQMNSLKPEDTAVYFCAADNIPLSSDVRATATEFGYWGQGTRVTVSS

SEQ ID NO: 42 - protein, 123 aa, synthetic construct
QVQLVESGGGLVQAGDSLRLSCAASGRSFRNYILAWYRQAPGKEREFLAAISWLDGTLYADSVEDRFTISRDNPKNTVHLQMDNLKPEDTAVYYCAADRGPVRPVLAPDVDYWGQGTQVTVSS

SEQ ID NO: 43 - protein, 127 aa, synthetic construct
QVQLQESGGGLVQAGGSLRLSCAASGRTFRTHNMGWFRRAPGKEREFVAAISWNIDNKLYADSVKGRSTISRDNGGNMVFLQMNSLKPEDTAVYYCAADKIPLSSDVAATATEYDDWGQGTQVTVSS

SEQ ID NO: 44 - protein, 123 aa, synthetic construct
QLQLVESGGGLVQAGDSLRLSCAASGRAFSRYAVGWFRMAPGKGREFVSAINSSGANTYVLDSVKGRFTISRDNDKNTAYLQMDSLQPEDTAVYWCAATSSSYSTYEANYNVWGQGTQVTVSS

SEQ ID NO: 45 - protein, 120 aa, synthetic construct
EVQLVESGGGLVQPGGSLRLSCATSGFTFRNNFMSWVRQAPGKGLEWVSTISYGGESTTYAESVKGRFTISRDNAKNTLYLQMNNLKPEDTAVYYCAKATSYDSIRSGSRGQGTQVTVSS

SEQ ID NO: 46 - protein, 120 aa, synthetic construct
EVQLVESGGGLVQPGGSLRLSCATSGFTFRNNFMSWVRQAPGEGLEWVSTISYGGESTTYAESVKGRFTISRDNAKNTLYLQMNNLKPEDTAVYYCAKATSYDSIRSGSRGQGTQVTVSS

SEQ ID NO: 47 - protein, 120 aa, synthetic construct
QVQLVESGGGLVQPGGSLRLSCAASGFTFSNNFMSWVRQAPGKGLEWVSTISYGGESTTYAESVKGRFTISRDNAKNTLYLQMNNLKPEDTAVYYCAKATSYDSVRSGSRGQGTQVTVSS

SEQ ID NO: 48 - protein, 123 aa, synthetic construct
QVQLVESGGGLVQAGDSLRLSCAASGRSFRNYILAWYRQAPGKEREFLAAISWLDGTLYADSVEDRFTISRDNPKNTVHLQMDNLKPEDTAVYYCAADQGPVRPVLAPDVDYWGQGTQVTVSS

SEQ ID NO: 49 - protein, 123 aa, synthetic construct
QVQLVESGGGWVQPGDSLRLSCAASGRSFRNYVMGWFRQVPGKEREFLSVITWLGGTLDADSVADRFTISRDNSKNTVYLQMDSLKPEDTAVYYCAADRGPARYISASDVDYWGQGTQVTVSS

SEQ ID NO: 50 - protein, 123 aa, synthetic construct
QVQLVESGGGLVQAGDSLRLSCAVSGRSFRNYILAWYRQAPGKEREFLAAISWLDGTFYANSVEGRFTISRDNPKNTVHLQMDGLKPEDTAVYYCAADRGPVRPVLAPDVDYWGQGTQVTVAS

SEQ ID NO: 51 - protein, 120 aa, synthetic construct
QVQLVESGGGLVQPGGSLRLSCAASGFTFSNNFMSWVRQAPGKGLEWVSTISYFGDSTRYAESVKGRFTISRDNEKNTLHLQMNNLKPEDTAVYYCAKATSYDSIRSGSRGRGTQVTVSS

SEQ ID NO: 52 - protein, 127 aa, synthetic construct
QVQLVESGGGLVQAGGSLRLSCAASGRTFRTHNMGWFRRAPGEEREFVAVISWNVDNKLYADSVKGRFTISRDNGRNMVYLQMNSLKPEDTAVYYCAADNIPLSSDVRATATEFGYWGQGTQVTVSS

SEQ ID NO: 53 - protein, 120 aa, synthetic construct
EVQLVESGGGLVQPGGSLRLSCAASGFTFSNNFMSWVRQAPGKGLEWVSTISYFGDSTTYAESVKGRFTISRDNAKNTLYLQMNNLKPEDTAVYYCAKATSYDSIRSGSRGRGTQVTVSS

SEQ ID NO: 54 - protein, 123 aa, synthetic construct
QLQLVESGGGLVQAGGSLRLSCAASGGAFSRYAVGWFRMAPGKGREFVSAIDLSGTNTHVLDSVKGRFTISRDNDKNTAYLQMDKLQPEDTAVYWCAATSSSYSDYEANYNIWGQGTQVTVSS

SEQ ID NO: 55 - protein, 123 aa, synthetic construct
QVQLQESGGGLVQAGDSLRLSCAASGRSFRNYILAWYRQAPGKEREFLAAISWLEGTLYADSVEDRFTISRDNPKNTVHLQMDSLKPEDTAVYYCAADRGPVRPVLAPDVDYWGQGTQVTVSS

SEQ ID NO: 56 - protein, 127 aa, synthetic construct
QVQLVESGGGLVQAGGSLRLSCAATGLTFRQHNMGWFRRAPGKEREFVAAISWNVGSTYFADSVKGRFTISRDNGKNMVYLQMNSLKPEDTAVYYCAADNIPLASDMRATATAYGYWGQGTQVTVSS

SEQ ID NO: 57 - protein, 123 aa, synthetic construct
QVQLVESGGGLVQTGDSLRLSCAASGRSFRNYILAWYRQAPGKEREFLAAISWLDGTLYADSVEGRFTISRDNPKNTVHLQMDSLKPEDTAVYYCAADRGPVRPVLAPDVDYWGQGTQVTVSS

SEQ ID NO: 58 - protein, 123 aa, synthetic construct
EVQLVESGGGLVQAGGSLRLSCAASGRTLSGYAMAWFRQPPDKGREFVTAISSSGIVTHVLDSVKGRFTISRDNAKNTVYLQMNSLQPEDTALYFCAATASSYSDYEANYNYWGQGTLVTVSS

SEQ ID NO: 59 - protein, 127 aa, synthetic construct
EVQLVESGGGLVQAGGSLRLSCAASGGTFRTRNMGWFRRAPGKEREFVAAVSWNVDNKLYAGSVKGRFTISRDNGRNMVYLQMNSLKPEDTAVYYCAADNIPLSSDMRPTATEYDYWGQGTQVTVSS

SEQ ID NO: 60 - protein, 123 aa, synthetic construct
EVQLVESGGGWVQPGDSLRLSCAASGRSFRNYVMGWFRQVPGKEREFLSVITSLGGTLDADSVADRFTISRDNSKNTVYLQMDSLKPEDTAVYYCAADRGPARYISASDVDYWGQGTQVTVSS

SEQ ID NO: 61 - protein, 127 aa, synthetic construct
EVQLVESGGRLVQSGGSLRLSCAASGRAFSTHNMGWFRRAPGKEREFVAAISWNVDNKLYANSVKGRFAISRDNGRNMVYLQMNSLKPEDTAVYYCAADNIPLSSDMRATATEYDVWGQGTQVTVSS

SEQ ID NO: 62 - protein, 120 aa, synthetic construct
QVQLVESGGGLVQPGGSLRLSCAASGFTFSNNFMSWVRQAPGKGLEWVSTISYGGESTTYAESVKGRFTISRDNAKNTLYLQMNNLKPEDTAVYYCAKATSYDSIRSGSRGQGTQVTVSS

SEQ ID NO: 63 - protein, 123 aa, synthetic construct
QVQLVESGGGLVQAGDSLRLSCAASGRSFRNYILAWYRQAPGKEREFLAAISWLDGTLYADSVEDRFTISRDNPKNTVHLQMDSLKPEDTAVYYCAADRGPVRPVLAPDVDYWGQGTQVTVSS

SEQ ID NO: 64 - protein, 123 aa, synthetic construct
EVQLVESGGGLVQAGGSLRLSCAASGGAFSRYAVGWFRMAPGKGREFVSAIDLSGTNTHVLDSVKGRFTISRDNDKNTAYLQMDKLQPEDTAVYWCAATSSSYSDYEANYNIWGQGTQVTVSS

SEQ ID NO: 65 - protein, 126 aa, synthetic construct
QVQLVESGGGLVETGGSLRLSCAASGITFNDHTMAWFRQAPGKEREFVAARDWSDIITRYASSVKGRFTISRDNAGNTGFLQMNSLRPEDTAVYYCAAREGGVVAGVRSGAPYDYWGQGTQVTVSS

SEQ ID NO: 66 - protein, 127 aa, synthetic construct
QVQLVESGGGLVQPGGSLRLSCAASGRTFETHNMGWFRRAPGKEREFVAVISWNVDSTEYTDSVKGRFTISRDNDKNMVYLQMNSLKPEDTGVYYCAADNIPLSSDMSPTAAEYGYWGQGTQVTVSS

SEQ ID NO: 67 - protein, 127 aa, synthetic construct
QVQLVESGGGLVQAGGSLRLSCAASGGTFRTRNMGWFRRAPGKEREFVAAVSWNVDNKLYAGSVKGRFTISRDNGRNMVYLQMNSLKPEDTAVYYCAADNIPLSSDMRPTATEYDYWGQGTQVTVSS

SEQ ID NO: 68 - protein, 123 aa, synthetic construct
QLQLVESGGGLVQAGDSLRLSCAASGRSFRNYIMAWYRQAPGKEREFLAAISWLDGTLYADSVEDRFTISRDNPKNTVHLQMDSLKPEDTAVYYCAADRGPVRPVLAPDVDYWGQGTQVTVSS

SEQ ID NO: 69 - protein, 120 aa, synthetic construct
QVQLVESGGGLVQPGGSLRLSCAASGFTFSNNFMSWVRQAPGKGLEWVSTISYFGDSTRYAESVKGRFTISRDNEKNTLYLQMNNLKPEDTAVYYCAKATSYDSIRSGSRGRGTQVTVSS

SEQ ID NO: 70 - protein, 123 aa, synthetic construct
QVQLQESGGGLVQAGDSLRLSCAASGRSFRNYILAWYRQAPGKEREFLAAISWLDGTLYADSVEDRFTISRDNPKNTVHLQMDSLKPEDTAVYYCAADRGPVRPVLAPDVDYWGQGTQVTVSS

SEQ ID NO: 71 - protein, 126 aa, synthetic construct
QVQLVESGGGLVQAGGSLRLSCAASGITFNDHTMAWFRQAPGKEREFVAARDWSDIITRYASSVKGRFTISRDNAGNTGFLQMNSLRPEDTAVYYCAAREGGVVAGVRSGAPYDYWGRGTQVTVSS

SEQ ID NO: 72 - protein, 127 aa, synthetic construct
QVQLVESGGGLVQAGGSLRLSCAASGRTFRTHNMGWFRRAPGKEREFVAAISWNVDNTLYADSVKGRFTISRDNDRNMVYLQMNSLKPEDTAVYFCAADNIPLSSDVRATATEFGYWGQGTRVTVSS

SEQ ID NO: 73 - protein, 123 aa, synthetic construct
QVQLQESGGGLVQAGDSLRLSCAASGRSFRNYILAWYRQAPGKEREFLAAISWLDGTFYANSVEGRFTISRDNPKNTVHLQMDGLKPEDTAVYYCAADRGPVRPVLAPDVDYWGQGTQVTVAS

SEQ ID NO: 74 - protein, 126 aa, synthetic construct
QVQLVESGGGLVQAGGSLRLSCAASGITFNDHTMAWFRQAPGKEREFVAARDWSDIITRYASSVKGRFTISRDNAGNTGFLQMNSLRPEDTAVYYCAAREGGVVAGVRSGAPYDYWGQGTQVTVSS

SEQ ID NO: 75 - protein, 126 aa, synthetic construct
EVQLVESGGGLVQAGGSLGLSCAASGITFNDHTMAWFRQAPGKEREFVAARDWSDIITRYASSVKGRFTISRDNAGNTGFLQMNSLRPEDTAVYYCAAREGGVVAGVRSGAPYDYWGQGTQVTVSP

SEQ ID NO: 76 - protein, 125 aa, synthetic construct
QVQLVESGGGLVQAGGSLRLSCAASGITFNDHTMAWFRQAPGKEREFVAARDWSDIITRYASSVKGRFTISRDNAGNTGFLQMNSLRPEDTAVYYCAAREGGVVAGVRSGAPYDYWGGTQVTVSS

SEQ ID NO: 77 - protein, 126 aa, synthetic construct
EVQLVESGGGLVQAGGSLRLSCAASGITFNDHTMAWFRQAPGKEREFVAARDWSDIITRYASSVKGRFTISRDNAGNTGFLQMNSLRPEDTAVYYCAAREGGVVAGVRSGAPYDYWGQGTQVTVSS

SEQ ID NO: 78 - protein, 126 aa, synthetic construct
EVQLVESGGGLVQAGGSLRLSCAASGITFNDHTMAWFRQAPGKEREFVAARDWSDIITRYAGSVKGRFTISRDNAGNTGFLQMNSLRPEDTAVYYCAAREGGVVAGVRSGAPYDYWGQGTQVTVSS

SEQ ID NO: 79 - protein, 126 aa, synthetic construct
QVQLQESGGGLVQPGGSLRLSCAASGITFNDHTMAWFRQAPGKEREFVAARDWSDIITRYASSVKGRFTISRDNAGNTGFLQMNSLRPEDTAVYYCAAREGGVVAGVRSGAPYDYWGQGTQVTVSS

SEQ ID NO: 80 - protein, 130 aa, synthetic construct
EVQLVESGGGLVQAGGSLRLSCAASGRTLYSSYGMAWFRQAPGKERDFVGSISRYGTYTSYADSVKDRFTISRDNAKSTVYLQMNNTKPEDTAVYYCAAYTYSGSFYSTVKTHRDEYQYWGQGTQVTVSS

SEQ ID NO: 81 - protein, 130 aa, synthetic construct
EVQLVESGGGSVQAGGSLRLSCEASGRTLFSSYGMGWFRQAPGKEREFVGAISRFGTYTSYADPVKDRFTISRDNAKSTVYLQMNNTKPEDTAVYYCAAYTYSGSFYSTVKTHHDEYRYWGQGTQVTVSS

SEQ ID NO: 82 - protein, 130 aa, synthetic construct
QLQLVESGGGLVQAGGSLRLSCAASGLTFDGYAIGWFRQASGKEREGVSYINGRDGSTFYADSVKGRFIISSDNAKNTVDLQMNSLNPDDAAVYYCAVDRLGSRGAYVSSWWRSPDMDLWGKGTLVTVSS

SEQ ID NO: 83 - protein, 127 aa, synthetic construct
QVQLVESGGGLVQAGGSLRLSCAASGGTFRTRNMGWFRRAPGKEREFVAAVSWSVDNKLYAGSVKGRFTISRDNGRNMVYLQMNSLKPEDTAVYYCAADNIPLSSDMRPTATEFGYWGQGTRVTVSS

SEQ ID NO: 84 - protein, 130 aa, synthetic construct
QLQLVESGGGLVQAGGSLRLSCAASGLTFDGYAIGWFRQASGKEREGVSYINGRDGSTFYADSVKGRFIISSDNAKNTVDLQMNSLKPDDAAVYYCAVDRLGSRGAYVSTWWRPPDMDLWGKGTLVTVSP

SEQ ID NO: 85 - protein, 130 aa, synthetic construct
EVQLVESGGGLVQAGGSLRLSCAASGFTFDGYAVGWFRQAPGKEPEGVSYITGSDGVTYYIDSVKGRFTISSDNAKRTVYLQMNTLKPEDTAVYYCAVDRLGSQGRYASSWWRAGDMDFWGKGTLVTVSS

SEQ ID NO: 86 - protein, 125 aa, synthetic construct
QVQLVESGGGLVQAGDSLRLSCAASGFNFGWHAMGWFRQAPGKEREFVATITWTGRDTYYADSVRGRFTISKDNAKNTLFLQMSSLRPDDTGVYYCAKARERATWAYSEDDCDYWGQGTQVTVSS

SEQ ID NO: 87 - protein, 130 aa, synthetic construct
QVQLVESGGGLVQAGGSLRLSCAASGLTFDGYAIGWFRQASGKEREGVSYINGRDGSTFYTDSVKGRFIISSDNAKNTVDLQMNSLKPDDAAVYYCAVDRLGSRGAYVSSWWRSPDMDLWGKGTLVTVSS

SEQ ID NO: 88 - protein, 125 aa, synthetic construct
QVQLVESGGGLVQAGDSLRLSCAASGFNFGWHAMGWFRQAPGKEREFVATITWTGRDTYYADSVRGRFTISKDNAKDTLFLQMNSLRPDDTGVYYCAKARERATWAYSEDDCDYWGQGTQVTVSS

SEQ ID NO: 89 - protein, 125 aa, synthetic construct
EVQLVESGGGLVQAGDSLRLSCAASGFNFGWHAMGWFRQAPGKEREFVATITWTGRDTYYADSVRGRFTISKDNAKDTLFLQMNSLRPDDTGVYYCAKARERATWAYSEDDCDYWGQGTQVTVSS

SEQ ID NO: 90 - protein, 130 aa, synthetic construct
QVQLVESGGGLAQAGASLRLSCAASGRTLYSSYGMAWFRQAPGKERDFVGSISRYGTYTSYADSVKGRFTISRDNAKSTVYLQMNNTKPEDTAVYYCAAYTYSGSFYSTVKTHRDEYQYWGQGTQVTVSS

SEQ ID NO: 91 - protein, 130 aa, synthetic construct
QLQLVESGGGLVQAGGSLRLSCAASGLTFDGYAIGWFRQASGKEREGVSYINGRDGSTFYADSVKGRFIISSDNAKNTVDLQMNSLKPDDAAVYYCAVDRLGSRGAYVSSWWRSPDMDLWGKGTLVTVSS

SEQ ID NO: 92 - protein, 130 aa, synthetic construct
QVQLVESGGGSVQAGGSLRLSCEASGRTLFSSYGMGWFRQAPGKEREFVGAISRFGTYTSYADPVKDRFTISRDNAKSTVYLQMNNTKPEDTAVYYCAAYTYSGSFYSTVKTHHDEYRYWGQGTQVTVSS

SEQ ID NO: 93 - protein, 130 aa, synthetic construct
QLQLVESGGGLVQAGGSLRLSCVAHGLTFDGYAIGWFRQAPGKELEGVSYITGSDGSRYYADSVKGRFTISSDVAKNTVYLHMNNLKPDDAARYYCAVDRLGSRGAYVSAWWRSSDMDLWGKGTLVTVSS

SEQ ID NO: 94 - protein, 131 aa, synthetic construct
EVQLVESGGGSVQAGGSLRLSCEASGPTLFSSYGMGWFRQAPGKKEREFVGAISRYGTYTSYADPVKDRFTISRDNAKSTVYLQMNNTKPEDTAVYYCAAYTYSGSFYSTVKTHHDEYHYWGQGTQVTVSS

SEQ ID NO: 95 - protein, 130 aa, synthetic construct
QLQLVESGGGLVQAGGSLRLSCTASGLTFEGYAIGWFRQAPGKEREGVSYITGSDASTYYIDSVKGRFTISSDFAKSTVYLQMNNLKPEDTAVYYCAVDRLGSRGGYASSWWRSGDMDLWGKGTLVTVSS

SEQ ID NO: 96 - protein, 130 aa, synthetic construct
QLQLVESGGGLVQAGGSLRLSCAASGLTFDGYAIGWFRQASGKEREGVSYINGRDGSTFYADSVKGRFIISSDNAKNTVDLQMNSLKPDDAAVYYCAVDRLGSRGAYVSTWWRSPDMDLWGKGTLVTVSS

SEQ ID NO: 97 - protein, 130 aa, synthetic construct
QLQLVESGGGLVQAGGSLRLSCAASGFTFDGYAIGWFRQAPGKEREGVSYITGSDGSTYYADSVKGRFTISSNNAKNTVYLHMNSLKPDDAAVYYCAIDRLGSRGAYVPIWWRSSDMDLWGKGTLVTVSS

SEQ ID NO: 98 - protein, 130 aa, synthetic construct
QLQLVESGGDLVQPGGSLRLSCTASGLTFDGYAIGWFRQAPGKEREGVSYITGSNGSTYYIDSVKGRFTISSDIAKSTVYLQMNTLKPEDTAVYYCAVDRLGSRGLYASSWWRSGDMDLWGKGTLVTVSS

SEQ ID NO: 99 - protein, 130 aa, synthetic construct
QLQLVESGGGLVQAGGSLRLSCTASGLTFDGYAIGWFRQAPGKEREGVSYITGSDGSTYYIDSVKGRFTISSDIAKSTVYLQMNSLKPEDTAVYYCAVDRLGSRGLYASSWWRSGDMDLWGKGTLVTVSS

SEQ ID NO: 100 - protein, 130 aa, synthetic construct
QLQLVESGGGLVQTGGSLRLSCSTSGFTFDGYAIGWFRQAPGKEPEGVSYITGSDGSTYYADSVKGRFTISSDNAKNTVYLHMNSLKPDDAAVYYCAIDRLGSGGAYVPIWWRSSDMDLWGKGTLVTVSS

SEQ ID NO: 101 - protein, 130 aa, synthetic construct
QVQLVESGGGLVQAGGSLRLSCTASGLTFDGYAIGWFRQAPGKEREGVSYITGSDGSTYYRDSVKGRFTISSDNAKSTVYLQMNTLKPEDTAVYYCAVDRLGSRGLYASSWWRSGDMDLWGKGTLVTVSS

SEQ ID NO: 102 - protein, 130 aa, synthetic construct
EVQLVESGGGLVQAGGSLRLSCTASGLTFDGYAIGWFRQAPGKEREGVSYITGSDGSTYYIDSVKGRFTISSDIAKSTVYLQMNSLKPEDTAVYYCAVDRLGSRGLYASSWWRSGDMDLWGKGTLVTVSS

SEQ ID NO: 103 - protein, 130 aa, synthetic construct
QVQLVESGGGLVQAGGSLRLSCTASGLTFEGYAIGWFRQAPGKEREGVSYITGSDASTYYIDSVKGRFTISSDFAKSTVYLQMNNLKPEDTAVYYCAVDRLGSRGGYASSWWRSGDMDLWGKGTLVTVSS

SEQ ID NO: 104 - protein, 131 aa, synthetic construct
QVQLVESGGGSVQAGGSLRLSCEASGPTLFSSYGMGWFRQAPGKKEREFVGAISRYGTYTSYADPVKDRLTISRGNAKSTVYLQMNNTKPEDTAVYYCAAYTYSGSFYSTVKTHHDEYHYWGQGTQVTVSS

SEQ ID NO: 105 - protein, 130 aa, synthetic construct
EVQLVESGGGSVQAGGSLRLSCAASGRTLYSSYGMAWFRQAPGKERDFVGSISRYGTYTSYADSVKDRFTISRDNAKSTVYLQMNNTKPEDTAVYYCAAYTYSGSFYSTVKTHRDEYQYWGQGTQVTVSS

SEQ ID NO: 106 - protein, 130 aa, synthetic construct
QVQLVESGGGSVQAGGSLRLSCAASGRTLYSSYGMAWFRQAPGKERDFVGSISRYGTYTSYADSVKDRFTISRDNAKSTVYLQMNNTKPEDTAVYYCAAYTYSGSFYSAVKTHRDEYQYWGQGTQVTVSS

SEQ ID NO: 107 - protein, 125 aa, synthetic construct
EVQLVESGGGLVQAGDSLRLSCAASGFNFGWHAMGWFRQAPGKEREFVATITWTGRDTYYADSVRGRFTISKDNAKNTLFLQMSSLRPDDTGVYYCAKARERATWAYSEDDCDYWGQGTQVTVSS

SEQ ID NO: 108 - protein, 130 aa, synthetic construct
QLQLVESGGGSVQAGGSLRLSCAASGRTLYSSYGMAWFRQAPGKERDFVGSISRYGTYTSYADSVKDRFTISRDNAKSTVYLQMNNTKPEDTAVYYCAAYTYSGSFYSTVKTHRDEYQYWGQGTQVTVSS

SEQ ID NO: 109 - protein, 125 aa, synthetic construct
QLQLVESGGGLVQAGDSLRLSCAASGFNFGWHAMGWFRQAPGKEREFVATITWTGRDTYYADSVRGRFTISKDNAKDTLFLQMNSLRPDDTGVYYCAKARERATWAYSEDDCDYWGQGTQVTVSS

SEQ ID NO: 110 - protein, 130 aa, synthetic construct
QLQLVESGGGLVQAGGSLRLSCLASGLTFDGYAIGWFRQAPGKELEGVSYITGSDGSSYYADSVKGRFTISSDNAKNTVYLHMNSLKPDDAAVYYCAIDHLGSRGGYHSSWWRSSDMDLWGKGTLVTVSS

SEQ ID NO: 111 - protein, 119 aa, synthetic construct
QVQLVESGGGLVQTGGSLRLSCVVSGSHFISDVMGWYRQVPGKQRELVADMADGGSAKYGDSVKGRFTILRDSVKNTVYLQMSSLNPEDTGVYYCKAGLWITGRHSDYWGQGTQVTVSS

SEQ ID NO: 112 - protein, 119 aa, synthetic construct
QVQLVESGGGLVQTGGSLRLSCAASGSQFINDVMGWYRQVPGKQRELVADMDDTGSTKYADSVKGRFTILRDSVKNTAYLQMSNLKPEDTGVYYCKAGLWIKGRHFDYWGQGTQVTVSS

SEQ ID NO: 113 - protein, 126 aa, synthetic construct
QVQLVESGGGLVQPGGSLGLSCAASGFTFDNYAMSWVRQAPGKGLEWVSSITGAGRGTHYADSVKGRFTISRDNAKNTLYLQMNSLKPEDTAVYYCAKYSSSTYYPPTPARGTDYRGPGTQVTVSS

SEQ ID NO: 114 - protein, 119 aa, synthetic construct
QVQLQESGGGLVQTGGSLRLSCAASGSQFINDVMGWYRQVPGKQRELVADMDDTGSTKYADSVKGRFTILRDSVKNTAYLQMSNLKPEDTGVYYCKAGLWIKGRHSDYWGQGTQVTVSS

SEQ ID NO: 115 - protein, 124 aa, synthetic construct
EVQLVESGGGLVQIGGSLRLSCAASGRTFSSITMAYFRQVPGKEREWVAGINFSGTRTFYADSVKGRFLISRDDAKSTMYLQMNSLKPEDTAVYYCAASPRGFYGPGNALYDYWGQGTQVTVSS

SEQ ID NO: 116 - protein, 119 aa, synthetic construct
EVQLVESGGGLVQTGGSLRLSCAVSGSRFISDVMGWYRQVPGKQRELVADMADGGSAKYADSVKGRFSILRDSVKNTVYLQMSSLKPEDTGIYYCKAGLWIAGRHSDYWGQGTQVTVSS

SEQ ID NO: 117 - protein, 119 aa, synthetic construct
QVQLVESGGGLVQTGGSLRLSCAVSGSRFISDVMGWYRQVPGKQRELVADMADGGSAKYADSVKGRFSILRDSAKNTVYLQMSSLKPEDTGIYYCKAGLWIAGRHSDYWGQGTQVTVSS

SEQ ID NO: 118 - protein, 126 aa, synthetic construct; identical to SEQ ID NO: 113

SEQ ID NO: 119 - protein, 126 aa, synthetic construct
QVQLVESGGGLVQPGGSLRLSCAASGFTFDNYAMTWVRQAPGKGLEWVSSITGAGRGTHYADSVKGRFTISRDNAKNTLYLQVNSLKPEDTAVYYCARYSSSTYYPTTPVRGTDYRGQGTQVTVSS

SEQ ID NO: 120 - protein, 119 aa, synthetic construct
EVQLVESGGTLVQTGGSLRLSCVVSGSHFISDVMGWYRQVPGKQRELVADMADGGSAKYGDSVKGRFTIVRDSVKNTVYLQMSSLNPEDTGVYYCKAGLWIKGRHSDYWGQGTQVTVTS

SEQ ID NO: 121 - protein, 119 aa, synthetic construct
QVQLVESGGGLVQPGGSLRLSCAASGSRFVSDFMGWYRQVPGKQRELVADMADGGSARYGDSVKGRFTILRDNMNSTAFLQMSSLKPEDTGVYYCKAGLWIAGRHFDYWGQGTQVTVSS

SEQ ID NO: 122 - protein, 124 aa, synthetic construct
QVQLVESGGGLVQVGGSLSVSCAASGRSFDSITMAYFRQAPGNEREFIAGINFSGSRTAYGDSVKGRFTISRDNAKNTVFLQMNSLNPEDTAVYYCAASPRGFYGPGHALYDYWGQGTQVTVSS

SEQ ID NO: 123 - protein, 119 aa, synthetic construct
EVQLVESGGGLVQTGGSLRLSCAASGSQFINDVMGWYRQVPGKQRELVADMDDTGSTKYADSVKGRFTILRDSVKNTAYLQMSNLKPEDTGVYYCKAGLWIKGRHSDYWGQGTQVTVSS

SEQ ID NO: 124 - protein, 123 aa, synthetic construct
EVQLVESGGGLVQAGGSLRLACALSGDVFVRYTMAWFRQAPGKEREFVASVTDSGRTTDYVASVQGRFTVSRDNNKNTVYLQMNSLKPEDTAVYYCAANTDYFQIRSLDRNTWGQGTQVTVSS

SEQ ID NO: 125 - protein, 119 aa, synthetic construct
QVQLVESGGGLVQPGGSLRLSCAASGSHFISDVMGWYRQVPGKQRELVADMADGGSVKYGDSVKGRFTILRDSVKNTVTLQMSSLNPEDTGVYYCKAGLWITGRHFDYWGQGIQVTVTS

SEQ ID NO: 126 - protein, 126 aa, synthetic construct
QVQLVESGGGLVQPGGSLRLSCAASGFTFSNYAMSWVRQAPGKGLEWVSSITGAGRGTYYAESVKGRFTISRDNDKNTLYLQMNSLKPEDTAVYYCAKYDSSTFYPPTPARGIADRGQGTRVTVSS

SEQ ID NO: 127 - protein, 119 aa, synthetic construct
QVQLVESGGGLVQTGGSLRLSCAASGSRFVSDFMGWYRQVPGKQRELVADMADGGSARYGDSVKGRFTILRDSGNSTAYLQMSSLKPEDTGVYYCKAGLWIAGRHFDYWGQGTQVTVSS

SEQ ID NO: 128 - protein, 127 aa, synthetic construct
QVQLVESGGGLVQAGGPLRLSCAASGGTFSSYAMGWFRQAPGKEREFVAATTRGGGRTMYAVSTEGRFTCSRDNAKNTVYLLMNSLKPEDTAVYYCAAMTSYYSGTYYPDSSDFDIWGQGTQVTVSS

SEQ ID NO: 129 - protein, 119 aa, synthetic construct
EVQLVESGGGSVQTGGSLRLSCVVSGSHFISDVMGWYRQVPGKQRELVADMADGGSVKYGDSVKGRFTILRDSVKNTVTLQMSSLNPEDTGVYYCKAGLWITGRHFDYWGQGTQVTVTS

SEQ ID NO: 130 - protein, 127 aa, synthetic construct
EVQLVESGGGLVQAGGSLRLSCAASGGTFSSYAMGWFRQAPGKEREFVAATTRGGGRTMYAVSTEGRFTCSRDNAKNTVYLLMNSLKPEDTAVYYCAAMTSYYSGTYYPDSSDFDIWGQGTQVTVSS

SEQ ID NO: 131 - protein, 126 aa, synthetic construct
QVQLVESGGGLVQPGGSLGLSCAASGFTFSNYAMSWVRQAPGKGLEWVASITGFGRGTDYADSVKGRFTVSRDNAKNTLYLQMNSLKPEDTAVYYCAKYSSSTYYPPTPARGRDYRGQGTQVTVSS

SEQ ID NO: 132 - protein, 119 aa, synthetic construct
EVQLVESGGGLVQTGGSLRLSCTASGSQFINDVMGWYRQVPGKQRELVADMDDTGSTKYADSVNGRFTILRDSVKNTAYLQMSNLKPEDTGVYYCKAGLWIKGRHSDYWGQGTQVTVSS

SEQ ID NO: 133 - protein, 127 aa, synthetic construct
EVQLVESGGGLVQAGGSLGLSCAASGGTFSSYAMGWFRQAPGKEREFVAATTRGGGRTMYAVSTEGRFTCSRDNAKNTVYLQMNSLKPKDTAIYYCAAMTSYYSGTYYPDSSDFDIWGQGTQVTVSS

SEQ ID NO: 134 - protein, 126 aa, synthetic construct
QVQLVESGGGLVQPGGSLELSCAASGFTFSNYAMSWVRQAPGKGLEWVSSITGFGRGTDYADSVKGRFTISRDNDKNTLYLQMNSLKPEDTAVYYCARYSSSTYYPPTPARGRDYRGQGTQVTVSS

SEQ ID NO: 135 - protein, 119 aa, synthetic construct
QVQLVESGGGLVQTGGSLRLSCAVSGSRFISDVMGWYRQVPGKQRELVADMADGGSAKYADSVKGRFSILRDSVKNTVYLQMSSLKPEDTGIYYCKAGLWIAGRHSDYWGQGTQVTVSS

SEQ ID NO: 136 - protein, 127 aa, synthetic construct
EVQLVESGGGLVQAGGSLRLSCAASGGTFSSYAMGWFRQAPGKEREFVAATTRGGGRTMYAVSTEGRFTCSRDNAKNTVYLQMNSLKPKDTAIYYCAAMTSYYSGTYYPDSSDFDIWGQGTQVTVSS

SEQ ID NO: 137 - protein, 119 aa, synthetic construct
EVQLVESGGGLVQTGGSLRLSCAASGSQFINDVMGWYRQVPGKQRELVADMDDTGSTKYADSVKGRFTILRDSVKNTAYLQMSNLKPEDTGVYYCKAGLWIKGRHFDYWGQGTQVTVSS

SEQ ID NO: 138 - protein, 119 aa, synthetic construct
QVQLVESGGGLVQAGGSLRLSCAASGSQFINDVMGWYRQVPGKQRELVADMDDTGSTKYADSVKGRFTILRDSVKNTAYLQMSNLKPEDTGVYYCKAGLWIKGRHFDYWGQGTQVTVSS

SEQ ID NO: 139 - protein, 127 aa, synthetic construct
QVQLVESGGGLVQAGDSLRLSCATSGLTFSSYALGWFRQAPGKKREFVAATTRGGGRTMYAVSTEGRFTCSRDNDKNTVYLLMNSLKPKDTAVYYCAAMTSYYSGTYYPDSSDFDIWGQGTQVTVSS

SEQ ID NO: 140 - protein, 119 aa, synthetic construct; identical to SEQ ID NO: 123

SEQ ID NO: 141 - protein, 119 aa, synthetic construct; identical to SEQ ID NO: 137

SEQ ID NO: 142 - protein, 119 aa, synthetic construct; identical to SEQ ID NO: 135

SEQ ID NO: 143 - protein, 126 aa, synthetic construct
QVQLVESGGGLVQPGESLGLSCAASGFTFSNYAMSWVRQAPGKGLEWVSSITGAGRGTDYADSVKGRFTISRDNAKNTLYLQMNSLKPEDTAVYYCAKYSSGTYYPPTPVRGTDYRGQGTQVTVSS

SEQ ID NO: 144 - protein, 124 aa, synthetic construct
EVQLVESGGGLVQIGGSLRLSCAASGRTFSSITMAYFRQVPGKEHEWVAGINFSGTRTFYADSVKGRFLISRDDAKSTMYLQMNSLKPEDTAVYYCAASPRGFYGPGNALYDYWGQGTQVTVSS

SEQ ID NO: 145 - protein, 119 aa, synthetic construct; identical to SEQ ID NO: 116

SEQ ID NO: 146 - protein, 119 aa, synthetic construct
EVQLVESGGGLVQTGGSLRLSCAASGSQFINDVTGWYRQVPGKQRELVADMDDTGSTKYADSVKGRFTILRDSVKNTAYLQMSNLKPEDTGVYYCKAGLWIKGRHSDYWGQGTQVTVSS

SEQ ID NO: 147 - protein, 119 aa, synthetic construct
EVQLVESGGGSVQTGGSLRLSCVVSGSHFISDVMGWYRQVPGKQRELVADMADGGSAKYGDSVKGRFTILRDSVKNTVTLQMSSLNPEDTGVYYCKAGLWITGRHSDYWGQGTQVTVTS

SEQ ID NO: 148 - protein, 127 aa, synthetic construct
QVQLQESGGGLVQAGGSLRLSCAASGGTFSSYAMGWFRQAPGKEREFVAATTRGGGRTMYAVSTEGRFTCSRDNDKNTVYLLMNSLKPKDTAVYYCAAMTSYYSGTYYPDSSDFDIWGQGTQVTVSS

SEQ ID NO: 149 - protein, 126 aa, synthetic construct; identical to SEQ ID NO: 143

SEQ ID NO: 150 - protein, 126 aa, synthetic construct
QLQLVESGGGLVQPGGSLELSCAASGFTFSNYAMSWVRQAPGKGLEWVSSITGFGRGTDYADSVKGRFTISRDNAKNTLYLQMNSLKPEDTAVYYCARYSSSTYYPPTPARGRDYRGQGTQVTVSS

SEQ ID NO: 151 - protein, 119 aa, synthetic construct; identical to SEQ ID NO: 123

SEQ ID NO: 152 - protein, 119 aa, synthetic construct
EVQLVESGGGLVQTGGSLRLSCAASGSRFISDFMGWYRQVPGKQRELVADMADGGSARYGDSVKGRFTILRESGNATAYLQMSSLKPEDTGVYYCKAGLWIAGRHFDYWGQGTQVTVSS

SEQ ID NO: 153 - protein, 123 aa, synthetic construct
QVQLVESGGGLVQAGGSLRLSCAVSGDVFVRYTMAWFRQAPGKEREFVATVTDSGRTTEYVDSVKGRFTVSRDNAKNTVYLQMNNLKPEDTAVYYCAANTDYFRIRSLDANTWGQGTQVTVSS

SEQ ID NO: 154 - protein, 123 aa, synthetic construct
EVQLVESGGGLVEAGGSLRLSCAASGRAFNNFPMGWFRQAPGKEREFVAAITWISGSTLYADSVKGRFTISRDKSKNTVYLQMSGLKPEDTALYYCAAALKTITRGQHDYTYWGQGTQVTVSS

SEQ ID NO: 155 - protein, 126 aa, synthetic construct
QVQLVESGGGLVQAGGSLRLSCAASGRTFSINTMGWFRQAPGKEREFVAAISRSGDSTVYVDSVKGRFTISRDNAKNTVYLQMNTLKPEDTAVYYCATTVAVGWTTRWSTIDFDSWGQGTQVTVSS

SEQ ID NO: 156 - protein, 125 aa, synthetic construct
EVQLVESGGGLVQAGGSLRLSCAASGRSLSTTEMGWFRQAPGKEREFVAAITWSGRGTMYAESVEGRFAVSRENAKNTVYLQMNSLKPEDTAIYYCAAARRGRAAVRSEGGYDFWGQGTQVTVSS

SEQ ID NO: 157 - protein, 123 aa, synthetic construct
QVQLVESGGGLVQAGGSLGLACALSGDVFVRYTMAWFRQAPGKEREFVASVTDSGRTTDYVASVQGRFTVSRDNNKNTVYLQMNSLKPEDTAVYYCAANTDYFQIRSLDRNTWGQGTQVTVSS

SEQ ID NO: 158 - protein, 123 aa, synthetic construct
QVQLVESGGGLVQAGGSLRLSCAASGDVFVRYTMAWFRQAPGKEREFVASVTDSGRTTDYVDSVKGRFTVSRDNAKNTVYLQMNNLKPEDTARYYCAANTDYFQIRSLDANTWGQGTQVTVSS

SEQ ID NO: 159 - protein, 123 aa, synthetic construct
QVQLVESGGGLVQAGGSLRLSCAVSGDVFVRYTMAWFRQAPGKEREFVASVTDSGRTTEYVDSVKGRFTVSRDNAKNTAYLQMNNLKPEDTAVYYCAANTDYFQIRSLDLNTWGQGTQVTVSS

SEQ ID NO: 160 - protein, 123 aa, synthetic construct
EVQLVESGGGLVQAGGSLRLSCTVSGDVFVRYTMAWFRQAPGKEREFVATVTDSGRTTEYVDSVKGRFTVSRDNAKNTVYLQMNNLKPEDTAVYYCAANTDYFRIRSLDANTWGQGTQVTVSS

SEQ ID NO: 161 - protein, 124 aa, synthetic construct
EVQLVESGGGLVQAGGSLRLSCAASGSTFSRQPMYWFRQAPGKEREFVAAITWSGRGTLYADSVEGRFTISRDNAKNTVYLQMNSLRPDDTAAYYCAAGPYGDAAYRHGRIDSWGQGTQVTVSS

SEQ ID NO: 162 - protein, 123 aa, synthetic construct
EVQLVESGGGLVQAGGSLRLSCVVSGDVFVRYTMAWFRQAPGKEREFVTSITDSGRTTEYVDSVKGRFTVSRDNAKNTVYLQMNNLKPEDTAVYYCAANTDYFRIRSLDANTWGQGTQVTVSS

SEQ ID NO: 163 - protein, 123 aa, synthetic construct
EVQLVESGGGLVQAGGSLRLSCVVSGDVFVRYTMAWFRQAPGKEREFVAVVTDSGRTTEYVDSVKGRFTVSRDNAKNTVYLQMNNLKPEDTAVYYCAANTDYFQIRSVDNNAWGQGTQVTVSS

SEQ ID NO: 164 - protein, 126 aa, synthetic construct
QVQLVESGGGLVQAGGSLRLSCAASGSIFSLNTMGWFRQAPGKEREFVAAISRSGGSATYGDSVKGRFTISTNNAKTTVYLQMNSLKPDDTAVYSCAASAAVGWTTRWSTIDFDSWGQGTQVTVSS

SEQ ID NO: 165 - protein, 123 aa, synthetic construct
QVQLVESGGGLVQAGGSLRLSCTVSGDVFVRYTMAWFRQAPGKEREFVASVTDSGRTTEYVHSVRGRFTVSRDNAKNTVYLQMNNLKPEDTAVYYCAANTDYFRIRSLDANTWGQGTQVTVSS

SEQ ID NO: 166 - protein, 121 aa, synthetic construct
EVQLVESGGGLVQAGDSLRISCAASGRIFSNYAMGWFRQAPGKETEFVAGITHLTSTTHYADSVKGRFTISRDNAKNTMHLQMNNLKPEDTALYYCAADRNIKITADWSYWGQGTQVTVAS

SEQ ID NO: 167 - protein, 123 aa, synthetic construct
QVQLVESGGGLVQAGGSLRLSCAVSGDVFVRYTMAWFRQAPGKEREFVASVTDSGRTTEYVDSAKGRFTVSRDNAKNTVYLQMNSLKPEDTAVYYCAANTDYFQIRSLRANTWGQGTQVTVSS

SEQ ID NO: 168 - protein, 125 aa, synthetic construct
EVQLVESGGGLVQAGGSLRLSCAASGRTFSTTEMGWFRQAPGKEREFVAAITWTGRGTMYAESVEGRFTISRENAKNMVYLQMNSLKPEDTAIYYCAAARRGRAAVRSEGGYDFWGQGTQVTVSS

SEQ ID NO: 169 - protein, 123 aa, synthetic construct
QVQLVESGGGLVQAGGSLRLACALSGDVFVRYTMAWFRQAPGKEREFVASVTDSGRTTDYVASVQGRFTVSRDNNKNTVYLQMNSLKPEDTAVYYCAANTDYFQIRSLDRNTWGQGTQVTVSS

SEQ ID NO: 170 - protein, 123 aa, synthetic construct
EVQLVESGGGLVQAGGSLRLSCAASGDVFVRYTMAWFRQAPGKEREFVASVTDSGRTTDYVDSVKGRFTVSRDNAKNTVYLQMNNLKPEDTAVYYCAANTDYFQIRSLEFNTWGQGTQVTVSS

SEQ ID NO: 171 - protein, 123 aa, synthetic construct
QVQLVESGGGLVQAGGSLRLSCTVSGDVFVRYTMAWFRQAPGKEREFVALVTDSGRTTEYVDSVKGRFTVSRDNAKNTVYLQMNNLKPEDTAVYYCAANTDYFRIRSLDANTWGQGTQVTVSS

SEQ ID NO: 172 - protein, 123 aa, synthetic construct
QLQLVESGGGLVQPGGSLRLSCAAAGRAIENYPVGWFRRAPGKEREFVAAITWISGSTLYADSVKGRFTISRDNAKNTVYLQMSSLKPEDTALYYCAAALKTITRGQNDYSYWGQGTQVTVSS

SEQ ID NO: 173 - protein, 126 aa, synthetic construct
QLQLVESGGGLVQTGTSLRLSCAASGHTSRINAMGWFRQFPGKEREFVAAISRNGGSTVYVDSVKGRFTISRDNAKSTVYLQMNSLKPEDTAVYYCTATDAVGWTTRWMTADFGFWGQGTQVTVSS

SEQ ID NO: 174 - protein, 123 aa, synthetic construct
QVQLVESGGGLVEAGGSLRLSCAASGRAFNNFPMGWFRQAPGKEREFVAAITWISGSTLYADSVKGRFTISRDKSKNTVYLQMSGLKPEDTALYYCAAALKTITRGQHDYTYWGQGTQVTVSS

SEQ ID NO: 175 - protein, 123 aa, synthetic construct; identical to SEQ ID NO: 169

SEQ ID NO: 176 - protein, 127 aa, synthetic construct
EVQLVESGGGLVQAGGSLRLSCAASGRTFSSDAKAWFRQAPGKEREFVAAITWAGRGTDYADSVKDRFTITRDNAKNMVYLQMSSLKPEDTAVYYCALNPTGVIGPGFRNSNRYDYWGQGTQVTVAS

SEQ ID NO: 177 - protein, 123 aa, synthetic construct
QVQLVESGGGLVQAGGSLRLSCAAAGRAIENYPVGWFRRAPGKEREFVAAITWISGSTLYADSVKGRFTISRDNAKNTVYLQMSSLKPEDTALYYCAAALKTITRGQNDYSYWGQGTQVTVSS

SEQ ID NO: 178 - protein, 123 aa, synthetic construct; identical to SEQ ID NO: 163

SEQ ID NO: 179 - protein, 125 aa, synthetic construct
QVQLVESGGGLVQAGGSLRLSCAASGRTFSTTEMGWFRQAPGKEREFVAAITWTGRGTMYAESVEGRFTISRENAKNMVYLQMNSLKPEDTAIYYCAAARRGRAAVRSEGGYDFWGQGTQVTVSS

SEQ ID NO: 180 - protein, 123 aa, synthetic construct
EVQLVESGGGLVQAGGSLRLSCAASGDVFVRYTMAWFRQAPGKEREFVASVTDSGRTTDYVDSVKGRFTVSRDNAKNTVYLQMNNLKPEDTAVYYCAANTDYFQIKSLDRNTWGQGTQVTVSS

SEQ ID NO: 181 - protein, 125 aa, synthetic construct
EVQLVESGGGLVQAGGSLRLSCAASGRTFSTTEMGWFRQAPGKEREFVAAITWTGRGTMYAESVEGRFTISRENAKNMVYLQMNSLKPEDTAIYYCAAARRGRAAVRSEGGYDFWGQGTQATVSS

SEQ ID NO: 182 - protein, 123 aa, synthetic construct
QVQLVESGGGLVQAGGSLRLSCAVSGDVFVRYTMAWFRQAPGKEREFVASVTDSGRTTEYVDSVKGRFTVSRDNAKNTVYLQMNSLKPEDTAVYYCAANTDYFQIRSLRANTWGQGTQVTVSS

SEQ ID NO: 183 - protein, 121 aa, synthetic construct
QVQLQESGGGLVQAGDSLRISCAASGRIFSNYAMGWFRQAPGKETEFVAGITHLTSTTHYADSVKGRFTISRDNAKNTMHLQMNNLKPEDTALYYCAADRNIKITADWSYWGQGTQVTVAS

SEQ ID NO: 184 - protein, 125 aa, synthetic construct
QVQLQESGGGLVQAGGSLRLSCAASGRTFSNYVMAWFRQAPGKEREFVGAITQTGRGTFYADSVEGRFTISRINDKNTVYLQMNSLKPEDTAVYYCSAPRSGRAGTRNQMDYEYWGQGTQVTVSS

SEQ ID NO: 185 - protein, 123 aa, synthetic construct; identical to SEQ ID NO: 20

SEQ ID NO: 186 - protein, 123 aa, synthetic construct
QLQLVESGGGLVQAGGSLRLSCAASGRDFSSYAMGWFRQAPGKEREFVVAITWTKRSTDFPDSVKGRFTISRDNAKNTVYLDMNSLKPEDTAVYYCASARGLPVTPLGDIIYWGEGTLVTVSS

SEQ ID NO: 187 - protein, 125 aa, synthetic construct
EVQLVESGGGLVQAGGSLRLSCAASGRTFSTTEMGWFRQAPGKEREFVAAITWTGRGTMYAESVEGRFTISRENAKNMVYLQMNSLKPEDTAIYYCAAARRGRAAVRSEGGYDFWGQGTQVAVSS

SEQ ID NO: 188 - protein, 121 aa, synthetic construct
QVQLQESGGGLVQAGGSLRLSCAVSGRSFRNYVMGWFRQAPGREREIVAGITQFTSTTYYDDSVKGRFTISRDNAKNTVYLQMNSLKPEDTALYYCAADRSIKMTADWAYWGQGTQVTVSS

SEQ ID NO: 189 - protein, 123 aa, synthetic construct
QVQLVESGGGLVQAGGSLRLSCAASGRADSNAIMAWFRQAPGKEREFIVAVTYSGMPTYQDDSVQGRFTASRDNAKNTVYLQMNSLKPEDTAVYYCAARMYSASTYYGDYDYWGQGTQVTVSS

SEQ ID NO: 190 - protein, 123 aa, synthetic construct
EVQLVESGGGSVQAGGSLRLSCAASGRTFSDYTMGWFRQAPGKEREFVVAITGTGHTTDMPDSVEGRFTISRDNAKNTIYLDMKNLKPGDTAVYYCASARGLPVTPLGDIIYWGEGTLVTVSS

SEQ ID NO: 191 - protein, 127 aa, synthetic construct
QVQLVESGGGLVQAGGSLTLSCAASGGAFSSDAKAWFRQAPGKEREFVAAITWAGRGTDYADSVKGRFTITRDNAKATVHLQMNSLKPEDTAVYYCALNPRGVIGPAFRNSNHYTYWGQGTQVTVSS

SEQ ID NO: 192 - protein, 125 aa, synthetic construct
QVQLQESGGGLVQAGGSMRLSCAASGRTFSNYVIAWFRQAPGKEREFVGAITQTGRGTFYASSVEGRFTLSRLNDQSTVYLQMNSLNPEDTGVYYCSAPRSGRAGTRNQMDYEYWGQGTQVTVSS

SEQ ID NO: 193 - protein, 126 aa, synthetic construct; identical to SEQ ID NO: 173

SEQ ID NO: 194 - protein, 126 aa, synthetic construct
QVQLVESGGGLVQAGGSLRLSCAASGFTFSNYAMSWVRQAPGKGLEWVSSITGFGRGTDYADSVKGRFTISRDNAKNTLYLQMNSLKPEDTAVYYCARYSSSTYYPPTPARGTDYRGQGTQVTVSS

SEQ ID NO: 195 - protein, 126 aa, synthetic construct; identical to SEQ ID NO: 113

SEQ ID NO: 196 - protein, 127 aa, synthetic construct
QVQLVESGGGLVQAGGSLRLSCAASGGTFSSYAMGWFRQAPGKEREFVAATTRGGGRTMYAVSTEGRFTCSRDNAKNTVYLLMNSLKPEDTAVYYCAAMTSYYSGTYYPDSSDFDIWGQGTQVTVSS

SEQ ID NO: 197 - protein, 123 aa, synthetic construct
QVQLVESGGGLVQVGGSLRVSCAASGRTSGDRNMGWFRQAPGKEREFVGIITWSSGSTVYADSVKGRFTISRDNAKNTVYLDMSSLKPEDTAVYYCAADYYPYSGSWNIMDYWGKGTLVTVSS

SEQ ID NO: 198 - protein, 127 aa, synthetic construct
EVQLVESGGGLVQAGGSLRLSCAASGGTFSSYAMGWFRQAPGKEREFVAATTRGGGRTMYAVSTEGRFTCSRDNAKNTVYLLMNRVKPEDTAVYYCAARTSYYSGTYYPASSDFDIWGQGTQVTVSS

SEQ ID NO: 199 - protein, 119 aa, synthetic construct
QVQLVESGGGSVQTGGSLRLSCVVSGSHFISDVMGWYRQVPGKQRELVADMADGGSAKYADSVKGRFTILRDSVKNTVTLQMSSLNPEDTGVYYCKAGLWITGRHSDYWGQGTQVTVTS

SEQ ID NO: 200 - protein, 127 aa, synthetic construct
QVQLVESGGGLVQAGGSLRLSCAASGGTFSSYAMGWFRQAPGKEREFVAATTRGGGRTMYAVSTEGRFTCSRDNAENTVYLQMNSLKPEDTAIYYCAAMTSYYSGTYYPDSSDFDIWGQGTQVTVSS

SEQ ID NO: 201 - protein, 123 aa, synthetic construct
EVQLVESGGGLVQVGDSLRLSCAASGRTVGSANMGWFRQAPGKEREFVAVITWSTGSTVYADSVKGRFTISRDNAKNTVYLDMSSLKPDDTAVYYCAADVYPYSGNLNIMDYWGKGTLVTVSS

SEQ ID NO: 202 - protein, 123 aa, synthetic construct
QVQLVESGGGLVQVGDSLRLSCAASGRTVGSANMGWFRQAPGKEREFVAVITWSTGSTVYADSVKGRFTISRDNAKNTVYLDMSSLKPEDTAVYYCAADVYPYSGNLNIMDYWGKGTLVTVSS

SEQ ID NO: 203 - protein, 119 aa, synthetic construct
QVQLQESGGGLVQTGGSLRLSCAVSGSRFISDVMGWYRQVPGKQRELVADMADGGSAKYADSVKGRFSILRDSVKNTVYLQMSSLKPEDTGIYYCKAGLWLAGRHSDYWGQGTQVTVSS

SEQ ID NO: 204 - protein, 124 aa, synthetic construct; identical to SEQ ID NO: 122

SEQ ID NO: 205 - protein, 126 aa, synthetic construct
QVQLVESGGGLVQPGGSLRLSCAASGFTFSNYAMSWVRQAPGKGLEWVSSITGAGRGTYYADSVKGRFTISRDNDKNTLYLQMNSLKPEDTAVYYCAKYDSSTYYPPTPARGIADRGQGIQVTVSS

SEQ ID NO: 206 - protein, 125 aa, synthetic construct
EVQLVESGGGLVQPGGSLRLSCAISGGTLDSYGIGWVRQAPGKQREGVSCMSRSDDRTFYADSVKGRFTISKDNAKSTVYLQMTNLKPDDTAVYYCAAVDAYGCSLVQPTTYDFWGLGTQVTVSS

SEQ ID NO: 207 - protein, 119 aa, synthetic construct; identical to SEQ ID NO: 129

SEQ ID NO: 208 - protein, 119 aa, synthetic construct
QLQLVESGGGLVQTGGSLRLSCAVSGSRFISDVMGWYRQVPGKQRELVADMADGGSAKYADSVKGRFSILRDSVKNTVYLQMSSLKPEDTGIYYCKAGLWIAGRHSDYWGQGTQVTVSS

SEQ ID NO: 209 - protein, 123 aa, synthetic construct
QVQLVESGGGLVQVGDSLRLSCAASGRTVGSANMGWFRQAPGKEREFVAVITWSTGSTVYADSVKGRFTISRDNAKNTVYLDLSSLKPEDTAVYYCAADVYPYSGNLNIMDYWGKGTQVTVSS

SEQ ID NO: 210 - protein, 125 aa, synthetic construct
QVQLVESGGGLVQPGGSLRLSCAVSGGTLHDYGIGWIRQAPGKQREGVSCMSRSDDKTYYADYVKGRFTISKDNAKNTVYLQMISLKPEDTAVYYCAAVDAYGCSLVQPTTYDYWGQGTQVTVSS

SEQ ID NO: 211 - protein, 119 aa, synthetic construct
QVQLVESGGTLVQTGGSLRLSCVVSGSHFISDVMGWYRQVPGKQRELVADMADGGSAKYGDSVKGRFTIVRDSVKNTVYLQMSSLNPEDTGVYYCKAGLWIKGRHSDYWGQGTQVTVTS

SEQ ID NO: 212 - protein, 126 aa, synthetic construct; identical to SEQ ID NO: 113

SEQ ID NO: 213 - protein, 119 aa, synthetic construct; identical to SEQ ID NO: 129

SEQ ID NO: 214 - protein, 119 aa, synthetic construct
QVQLVESGGGLVQTGGSLRLSCAASGSQFINDVMGWYRQVPGKQRELVADMDDTGSTKYADSVKGRFTILRDSVKNTAYLQMSNLKPEDTGVYYCKAGLWIKGRHSDYWGQGTQVTVSS

SEQ ID NO: 215 - protein, 127 aa, synthetic construct
EVQLVESGGGLVQAGASLELSCAASGGTFSSYAMGWFRQAPGKEREFVAATTRGGGRTMYAVSTEGRFSCSRDNAKNTVNLLIKNLKPEDTAVYYCAARTSYYDGTYYPASSDFDIWGQGTQVTVSS

SEQ ID NO: 216 - protein, 126 aa, synthetic construct
QVQLVESGGGLVQPGGSLRLSCAASGFTFSNYAMSWVRQAPGKELEWVSSITSAGRGTHYADTVKGRFTISRDNDENTLYLQMNSLEPEDTAVYYCAKYSSATYYPPTPAQGRDYRGQGTQVTVSS

SEQ ID NO: 217 - protein, 119 aa, synthetic construct
QVQLVESGGGLVQTGGSLRLSCAVSGSHFISDVMGWYRQVPEKQRELVADMADGNSAKYADSVKGRFSILRDSVKNTVYLQMSSLKPEDTGIYYCKAGLWIAGRHSDYWGQGTQVTVSS

SEQ ID NO: 218 - protein, 119 aa, synthetic construct; identical to SEQ ID NO: 123

SEQ ID NO: 219 - protein, 127 aa, synthetic construct
QVQLVESGGGLVQAGGSLALSCAASGGTFSSYAMGWFRQAPGKEREFVAATTRGGGRTMYAVSTEGRFSCSRDNAKNTVYLLIKNLKPEDTAVYYCAARTSYYDGTYYPASSDFDIWGQGTQVTVSS

SEQ ID NO: 220 - protein, 123 aa, synthetic construct; identical to SEQ ID NO: 124

SEQ ID NO: 221 - protein, 115 aa, synthetic construct
EVQLVESGGGLVQAGGSLRLSCAVSGVIFWSDVVGWYRQASGKQRELVATINLDDTKHYGEVVKGRFAISRDSHKNAYYLQLNSLKPEDTAVYYCNVRRGSEFYWGQGTQVTVSS

SEQ ID NO: 222 - protein, 124 aa, synthetic construct; identical to SEQ ID NO: 115

SEQ ID NO: 223 - protein, 127 aa, synthetic construct
QLQLVESGGGLVQAGGSLALSCAASGGTFSSYAMGWFRQAPGKEREFVAATTRGGGRTMYAVSTEGRFSCSRDNAKNTVYLLIKNLKPEDTAVYYCAARTSYYDGTYYPASSDFDIWGQGTQVTVSS

SEQ ID NO: 224 - protein, 119 aa, synthetic construct
EVQLVESGGGLVQTGGSLRLSCAVSGSRFISDVMGWYRQVPGKARELVADMADGGSAKYADSVKGRFSIVRDSGKSTMYLQMSSLKPEDTGMYYCKAGLWIAGRHSDYWGQGTQVTVSS

SEQ ID NO: 225 - protein, 123 aa, synthetic construct; identical to SEQ ID NO: 169

SEQ ID NO: 226 - protein, 126 aa, synthetic construct
QVQLVESGGGLVQAGRSLGLSCAASGFTFDNYAMSWVRQAPGKGLEWVSSITGAGRGTHYADSVKGRFTISRDNAKNTLYLQMNSLKPEDTAVYYCAKYSSSTYYPPTPARGTDYRGPGTQVTVSS

SEQ ID NO: 227 - protein, 119 aa, synthetic construct; identical to SEQ ID NO: 114

SEQ ID NO: 228 - protein, 123 aa, synthetic construct; identical to SEQ ID NO: 174

SEQ ID NO: 229 - protein, 121 aa, synthetic construct
QVQLVESGGGLVQAGDSLRLSCAASGRSLSTDCMGWVRQAPGKEREFVAGITWGTGSTLYADSVEGRFTISKDNAKNTGYLQMSSLKPEDTAVYYCAVDRYCYRGTVYRDWGRGTQVTVSS

SEQ ID NO: 230 - protein, 123 aa, synthetic construct
EVQLVESGGGLVQAGGSLRLSCAASGDVFVRYTMAWFRQAPGKEREFVASVTDSGRTTDYGDSVKGRFTVSRDNAKNTVYLQMNNLKPEDTAVYYCAANTDYFQIRSLDANTWGQGTQVTVSS

SEQ ID NO: 231 - protein, 123 aa, synthetic construct; identical to SEQ ID NO: 153

SEQ ID NO: 232 - protein, 123 aa, synthetic construct
QVQLVESGGGLVQAGGSLRLSCAASGRTFSSYVMGWFRQAPGKEREFVVAITGTRRTTDWPDSVKGRFTISRDNAQNTVYLDMNSLKPEDTAVYYCASARGLPVPPLGDIIHWGEGTLVTVSS

SEQ ID NO: 233 - protein, 127 aa, synthetic construct
QVQLVESGGGLVQAGGSLRLSCAASGRTFSSDAKGWFRQAPGKEREFVAAITWAGRGTDYADSVKGRFTITRDNAKNMVYLQMSNLKPEDTAVYYCALNPEGVIGPYFRNSNRYNYWGQGTQVTVSS

SEQ ID NO: 234 - protein, 123 aa, synthetic construct
EVQLVESGGGLVQAGGSLRLSCVVSGDVFVRYTMAWFRQAPGKEREFVAAVTDSGRTTEYVDSVKGRFTVSRDNAKNTVYLQMNNLKPEDTAVYYCAANTDYFQIRSVDNNAWGQGTQVTVSS

SEQ ID NO: 235 - protein, 123 aa, synthetic construct; identical to SEQ ID NO: 169

SEQ ID NO: 236 - protein, 123 aa, synthetic construct; identical to SEQ ID NO: 124

SEQ ID NO: 237 - protein, 123 aa, synthetic construct; identical to SEQ ID NO: 177

SEQ ID NO: 238 - protein, 123 aa, synthetic construct
QVQLVESGGGLVQAGGSLRLACALSGDVFVRYTMAWFRQAPGKGREFVASVTDSGRTTDYVASVQGRFTVSRDNNKNTVYLQMNSLKPEDTAVYYCAANTDYFQIRSLDRNTWGQGTQVTVSS

SEQ ID NO: 239 - protein, 127 aa, synthetic construct
QVQLVESGGGLVQAGGSLRLACAASGRTFSTLTMGWFRQAPGKEREFVAGISPSGGYAWHADSVKGRFTIDRDNAKNTVYLQTRSLRPEDTAVYYCAADHPPYGAVASRSEYEYDDWGPGTRVTVSS

SEQ ID NO: 240 - protein, 123 aa, synthetic construct
QVQLVESGGGLVQAGGSLRLSCVVSGDVFVRYTMAWFRQAPGKEREFVTSITDSGRTTEYVDSVKGRFTVSRDNAKNTVYLQMNNLKPEDTAVYYCAANTDYFRIRSLDANTWGQGTQVTVSS

SEQ ID NO: 241 - protein, 123 aa, synthetic construct; identical to SEQ ID NO: 23

SEQ ID NO: 242 - protein, 123 aa, synthetic construct
EVQLVESGGGLVQAGGSLTLSCAASGRAFSNYPVGWFRQAPGKEREFVAAITWLSGSTLYADSVEGRFTISRDNAKNTVYLLMSSLKPEDTALYFCAAALKTITRGQNDYSYWGQGTQVTVSS

SEQ ID NO: 243 - protein, 123 aa, synthetic construct
QVQLVESGGGLVQAGGSLRLSCVVSGDVFVRYTMAWFRQAPGKEREFVAVVTDSGRTTEYVDSVKGRFTVSRDNAKNTVYLQMNNLKPEDTAVYYCAANTDYFQIRSVDNNAWGQGTQVTVSS

SEQ ID NO: 244 - protein, 126 aa, synthetic construct
QVQLVESGGGLVQAGGSLRLSCAASGSIFSINAMGWFRQAPGKEREFVAAISRSGGSTAYVDSVKGRFTISRDNSKNMVHLQMNSLKSEDEAVYYCAATAAVGWTSRWITTDFDSWGQGTQVTVSS

SEQ ID NO: 245 - protein, 123 aa, synthetic construct; identical to SEQ ID NO: 169

SEQ ID NO: 246 - protein, 123 aa, synthetic construct; identical to SEQ ID NO: 243

SEQ ID NO: 247 - protein, 125 aa, synthetic construct; identical to SEQ ID NO: 179

SEQ ID NO: 248 - protein, 123 aa, synthetic construct
QVQLQESGGGLVQAGDSLRLSCVVSGRDFSGYTMGWFRQPPGKEREFVALITWSTGRVHYTDSVEGRFTISRDSAKNTVYLQMNSLKPEDTAVYTCAAGRVGYTTNLHSYDYSGQGTQVIVSA

SEQ ID NO: 249 - protein, 125 aa, synthetic construct
EVQLVESGGGLVQPGGSLRLSCAASGFTFRNYAMSWVRQAPGKGLEWVGGITGEGLGTIYQDSVEGRFTISRNNAKNTLYLQMNSLRSEDTAVYYCTKMASGTLFRDKPYEYTSRGQGTQVTVSS

SEQ ID NO: 250 - protein, 127 aa, synthetic construct
QVQLVESGGGLVQAGGSLRLSCAASGRSYAMGWFRQAPGKEREFVAAISWSASSTYYSESVKGRFTISRENAKNTVYLQMNSLKPEDTAVYYCAVRASPFVAGSYDPSDDPADYGSWGQGTQVIVSS

SEQ ID NO: 251 - protein, 125 aa, synthetic construct; identical to SEQ ID NO: 179

SEQ ID NO: 252 - protein, 123 aa, synthetic construct; identical to SEQ ID NO: 124

SEQ ID NO: 253 - protein, 123 aa, synthetic construct; identical to SEQ ID NO: 169

SEQ ID NO: 254 - protein, 125 aa, synthetic construct
QVQLVESGGGLVQAGGSLRLSCAASGRTFSTTDVGWFRQAPGKEREFVAAITWSSHSTLYADSVEGRFTVTRENAKNTVYLQMNSLKPEDTAVYYCAAVRRGWAVVRTEGAYDFWGQGTQVTVSA

SEQ ID NO: 255 - protein, 123 aa, synthetic construct
EVQLVESGGGLVQAGGSLRLSCVVSGDVFVRYTMAWFRQAPGKEREFVAAVTDSGRTTEYVDSVKGRFTVSRDNAKNTVYLQMNNLEPEDTAVYYCAANTDYFQIRSVDNNAWGQGTQVTVSS

SEQ ID NO: 256 - protein, 127 aa, synthetic construct
QVQLVESGGGLAQAGGSLRLSCAASGRTFSQDAKAWFRQAPGKEREFVAAITWSGRDTDYADSVKGRFTIARDNAKNTVYLQMDSLKPEDTAVYYCAVYPQGTIGPYFRSSNHYDYWGQGTQVTVSS

SEQ ID NO: 257 - protein, 123 aa, synthetic construct; identical to SEQ ID NO: 170

SEQ ID NO: 258 - protein, 123 aa, synthetic construct
EVQLVESGGGLVQAGGSLRLSCAASGDVFVRYTMAWFRQAPGKEREFVAAVTDSGRTADYVDSVKGRFTVSRDNAKNTVYLQMNNLKPEDTAVYYCAANTDYFQIRSLDRNTWGQGTQVTVSS

SEQ ID NO: 259 - protein, 123 aa, synthetic construct
QVQLVESGGGLVQAGGSLRLSCAASGRAFSTYSMGWFRQTPGKEREFVAIISESGGIIDYGDSVKGRFTLSRDNAKNTVSLQMSSLQPEDTAVYYCAAARDWFARTAYQYDYWGQGTQVTVSA

SEQ ID NO: 260 - protein, 123 aa, synthetic construct; identical to SEQ ID NO: 169

SEQ ID NO: 261 - protein, 123 aa, synthetic construct
QVQLVESGGGLVQAGGSLRLSCAASGDVFVRYTMAWFRQAPGKEREFVASVTDSGRTTDYVHSVKGRFTVSRDNAKNTVYLQMNNLKPEDTAVYYCAANTDYFQIRSLDANTWGQGTQVTVSS

SEQ ID NO: 262 - protein, 123 aa, synthetic construct
QVQLVESGGGLVQAGGSLRLSCAASGDVFVRYTMAWFRQAPGKEREFVASVTDSGRTTDYVDSVKGRFTVSRDNAKNTVYLQMNALKPEDTAVYYCAANTDYFQIKSLDLNTWGQGTQVTVSS

SEQ ID NO: 263 - protein, 123 aa, synthetic construct
QVQLVESGGRLVQAGGSLRLSCAASGDVFVRYTMAWFRQAPGKEREFVASVTDSGRTTEYVDSVKGRFTVSRDNAKNTAYLQMNNLKPEDTAVYYCAANTDYFQIRSLNLNTWGQGTQVTVSS

SEQ ID NO: 264 - protein, 123 aa, synthetic construct
EVQLVESGGGLVQAGDSLRLSCVVSGRGFSTYTMGWFRQAPGKEREFVAAITWSTGRTSYADSVKGRFTISRENAENTVYLQMNSLELEDTAVYYCATDQVLWTTRPRDMRYWGQGTQVTVSF

SEQ ID NO: 265 - protein, 123 aa, synthetic construct
EVQLVESGGGLVQAGGSLRLSCAVSGDVFVRYTMAWFRQAPGKEREFVASVTDSGRTTDYVHSVKGRFTVSRDNAKNTVYLQMNNLKPEDTAVYYCAANTDYFQIKSLDANTWGQGTQVTVSS

SEQ ID NO: 266 - protein, 123 aa, synthetic construct
QVQLVESGGGLVQAGGSLRLSCVVSGDVFVRYTMAWFRQAPGKEREFVAAVTDSGRTTEYVDSVKGRFTVSRDNAKNTVYLQMNNLKPEDTAVYYCAANTDYFQIRSVDNNAWGQGTQVTVSS

SEQ ID NO: 267 - protein, 123 aa, synthetic construct; identical to SEQ ID NO: 243

SEQ ID NO: 268 - protein, 123 aa, synthetic construct; identical to SEQ ID NO: 153

SEQ ID NO: 269 - protein, 123 aa, synthetic construct
QVQLQESGGGLVQAGGSLRLSCAASGDVFVRYTMAWFRQAPGKEREFVASVTDSGRTTDYVDSVKGRFTVSRDNAKNTVYLQMNALKPEDTAVYYCAANTDYFQIKSLDLNTWGQGTQVTVSS

SEQ ID NO: 270 - protein, 123 aa, synthetic construct
EVQLVESGGGLVQAGGSLRLSCVVSGDVFVRYTMAWFRQAPRKEREFVAVVTDSGRTTEYVDSVKGRFTVSRDNAKNTVYLQMNNLKPEDTAVYYCAANTDYFQIRSVDNNAWGQGTQVTVSS

SEQ ID NO: 271 - protein, 123 aa, synthetic construct; identical to SEQ ID NO: 159

SEQ ID NO: 272 - protein, 123 aa, synthetic construct; identical to SEQ ID NO: 170

SEQ ID NO: 273 - protein, 123 aa, synthetic construct
QVQLVESGGGLVQAGGSLRLSCAASGDVFVRYTMAWFRQAPGKEREFVASVTDSGRTTEYVDSVKGRFTVSRDNAKNTAYLQMNNLKPEDTAIYYCAANTDYFQIRSLDLNTWGQGTQVTVSS

SEQ ID NO: 274 - protein, 123 aa, synthetic construct
EVQLVESGGGLVQAGGSLRLSCAASGDVFVRYTMAWFRQAPGKEREFVASVTDSGRTTDYVDSVKGRFTVSRDNAKNTVYLQMNNLKPEDTAVYYCAANTDYFQIKSLDRNTWGQGTQVTVSP

SEQ ID NO: 275 - protein, 123 aa, synthetic construct; identical to SEQ ID NO: 243

SEQ ID NO: 276 - protein, 123 aa, synthetic construct; identical to SEQ ID NO: 159

SEQ ID NO: 277 - protein, 123 aa, synthetic construct; identical to SEQ ID NO: 159

SEQ ID NO: 278 - protein, 123 aa, synthetic construct
QVQLQESGGGLVQAGGSLRLSCAASGDVFVRYTMAWFRQAPGKEREFVASVTDSGRTTDYVDSVKGRFTVSRDNAKNTVYLQMNNLKPEDTAVYYCAANTDYFQIRSLEFNTWGQGTQVTVSS

SEQ ID NO: 279 - protein, 123 aa, synthetic construct
QVQLQESGGGLVQAGGSLRLSCVVSGDVFVRYTMAWFRQAPGKEREFVAVVTDSGRTTEYVDSVKGRFTVSRDNAKNTVYLQMNNLKPEDTAVYYCAANTDYFQIRSVDNNAWGQGTQVTVSS

SEQ ID NO: 280 - protein, 123 aa, synthetic construct; identical to SEQ ID NO: 159

SEQ ID NO: 281 - protein, 123 aa, synthetic construct; identical to SEQ ID NO: 182

SEQ ID NO: 282 - protein, 123 aa, synthetic construct; identical to SEQ ID NO: 279

SEQ ID NO: 283 - protein, 123 aa, synthetic construct
EVQLVESGGGLVQAGGSLRLSCAVSGDVFVRYTMAWFRQAPGKEREFVASVTDSGRTTEYVDSVKGRFTVSRDNAKNTAYLQMNNLKPEDTAVYYCAANTDYFQIRSLDLNTWGQGTQVTVSS

SEQ ID NO: 284 - protein, 123 aa, synthetic construct; identical to SEQ ID NO: 23

SEQ ID NO: 285 - protein, 123 aa, synthetic construct
QVQLVESGGGLVQAGGSLRLSCAASGDVFVRYTMAWFRQAPGKEREFVASVTDSGRTTDYVDSVKGRFTVSRDNAKNTVYLQMNNLKPEDTAVYYCAANTDYFQIRSLEFNTWGQGTQVTVSS

SEQ ID NO: 286 - protein, 123 aa, synthetic construct
EVQLVESGGGLVQAGGSLRLSCVVSGDVFVRYTMAWFRQAPGKGREFVAVVTDSGRTTEYVDSVKGRFTVSRDNAKNTVYLQMNNLKPEDTAVYYCAANTDYFQIRSVDNNAWGQGTQVTVSS

SEQ ID NO: 287 - protein, 123 aa, synthetic construct; identical to SEQ ID NO: 182

SEQ ID NO: 288 - protein, 123 aa, synthetic construct
QVQLVESGGRLVQAGGSLRLSCVVSGDVFVRYTMAWFRQAPGKEREFVAVVTDSGRTTEYVGSVKGRFTVSRDNAKNTVYLQMNNLKPEDTAVYYCAANTDYFQIRSVDNNAWGQGTQVTVSS

SEQ ID NO: 289 - protein, 123 aa, synthetic construct
QLQLVESGGGLVQAGGSLRLACALSGDVFVRYTMAWFRQAPGKEREFVASVTDSGRTTDYVASVQGRFTVSRDNNKNTVYLQMNSLKPEDTAVYYCAANTDYFQIRSLDRNTWGQGTQVTVSS

SEQ ID NO: 290 - protein, 123 aa, synthetic construct
EVQLVESGGGLVQAGGPLRLSCAVSGDVFVRYTMAWFRQAPGKEREFVASVTDSGRTTEYVDSVKGRFTVSRDNAKNTAYLQMNNLKPEDTAVYYCAANTDYFQIRSLDLNTWGQGTQVTVSS

SEQ ID NO: 291 - protein, 123 aa, synthetic construct; identical to SEQ ID NO: 279

SEQ ID NO: 292 - protein, 123 aa, synthetic construct; identical to SEQ ID NO: 283

SEQ ID NO: 293 - protein, 123 aa, synthetic construct
EVQLVESGGGLVQAGGSLRLFCAVSGDVFVRYTMAWFRQAPGKEREFVASVTDSGRTTEYVDSVKGRFTVSRDNAKDTAYLQMNNLKPEDTAVYYCAANTDYFQIRSLDLNTWGQGTQVTVSS

SEQ ID NO: 294 - protein, 123 aa, synthetic construct; identical to SEQ ID NO: 285

SEQ ID NO: 295 - protein, 123 aa, synthetic construct; identical to SEQ ID NO: 283

SEQ ID NO: 296 - protein, 123 aa, synthetic construct; identical to SEQ ID NO: 273

SEQ ID NO: 297 - protein, 123 aa, synthetic construct
EVQLVESGGGLVQAGESLRLSCAASGQYFSTYSMAWFRRTPGKEREFVTIISESGGIKEYVDSVKGRFTVSRDNAKNTVYLQMNSLKPEDTAVYYCAAARDWFARNEYQYDYWGQGTQVTVSS

SEQ ID NO: 298 - protein, 123 aa, synthetic construct; identical to SEQ ID NO: 273

SEQ ID NO: 299 - protein, 123 aa, synthetic construct
QVQLVESGGGLVQAGGSLRLSCAVSGDVFVRYTMAWFRQAPGKEREFVASVTDSGRTTEYVDSVKGRFTVSRDNAKNTAYLQMNNLKPEDTAVYYCAANTDYFQIRSLDLNTWGQGTQVTVSL

SEQ ID NO: 300 - protein, 123 aa, synthetic construct; identical to SEQ ID NO: 283

SEQ ID NO: 301 - protein, 123 aa, synthetic construct
QVQLVESGGGLVQAGGSLRLSCAASGDVFVRYTMAWFRQAPGKEREFVASVTDSGRTTEYVDSVKGRFTVSRDNAKNTAYLQMNNLKPEDTAVYYCAANTDYFQIRSLNLNTWGQGTQVTVSS

SEQ ID NO: 302 - protein, 123 aa, synthetic construct
QVQLQESGGGLVQAGGSLRLSCAASGDVFVRYTMAWFRQAPGKEREFVASVTDSGRTTEYVDSVKGRFTVSRDNAKNTAYLQMNNLKPEDTAVYYCAANTDYFQIRSLNLNTWGQGTQVTVSS

SEQ ID NO: 303 - protein, 123 aa, synthetic construct; identical to SEQ ID NO: 273

SEQ ID NO: 304 - protein, 123 aa, synthetic construct; identical to SEQ ID NO: 180

SEQ ID NO: 305 - protein, 123 aa, synthetic construct
QVQLVESGGGLVQAGGSLRLSCAVSGDVLVRYTMAWFRQAPGKEREFVASVTDSGRTTEYVDSVKGRFTVSRDNAKNTAYLQMNNLKPEDTAVYYCAANTDYFQIRSLDLNTWGQGTQVTVSS

SEQ ID NO: 306 - protein, 123 aa, synthetic construct
EVQLVESGGGLVQAGGSLRLSCAASGDVFVRYTMAWFRQTPGKEREFVASVTDSGRTTEYVDSVKGRFTVSRDNAKNTVYLQMNNLKPEDTAVYYCAANTDYFQIRSLRANTWGQGTQVTVSS

SEQ ID NO: 307 - protein, 123 aa, synthetic construct
QVQLVESGGGLVQAGGSLTLSCAASGRAFSNYPVGWFRQAPGKEREFVAAITWLSGSTLYADSVEGRFTISRDNAKNTVYLLMSSLKPEDTALYFCAAALKTITRGQNDYSYWGQGTQVTVSS

SEQ ID NO: 308 - protein, 123 aa, synthetic construct
QVQLVESGGGLVQPGGSLRLSCAASGDVFVRYTMAWFRQAPGKEREFVASVTDSGRTTDYVDSVKGRFTVSRDNAKNTVYLQMNNLKPEDTAVYYCAANTDYFQIKSLDRNTWGQGTQVTVSS

SEQ ID NO: 309 - protein, 123 aa, synthetic construct
QVQLVESGGGLVQAGGSLRLSCAASGDVLVRYTMAWFRQAPGKEREFVASVTDSGRTTEYVDSVKGRFTVSRDNAKNTAYLQMNNLKPEDTAIYYCAANTDYFQIRSLDLNTWGQGTQVTVSS

SEQ ID NO: 310 - protein, 123 aa, synthetic construct; identical to SEQ ID NO: 159

SEQ ID NO: 311 - protein, 123 aa, synthetic construct; identical to SEQ ID NO: 301

SEQ ID NO: 312 - protein, 123 aa, synthetic construct; identical to SEQ ID NO: 262

SEQ ID NO: 313 - protein, 126 aa, synthetic construct
EVQLVESGGGLVQAGGSLRLSCAASGRTLSRYAMGWFRQAPGKEREFVTANSWGGDTYYADSVQGRFTFSRDNAKNTVYLQMNSLQPEDTAVYYCAAAPTSFATTAYSSSNSYAYWGQGTQVTVSS

SEQ ID NO: 314 - protein, 126 aa, synthetic construct
EVQLVESGGGLVQAGASLRLSCAASGRTLSRYAMGWFRQAPGKEREFVAASSWGGDTYYADSVEGRFTFSRDNAKNAVYLQMNSLQPEDTAVYYCAGAPTSFATTAYSSSNSYAYWGQGTQVTVSS

SEQ ID NO: 315 - protein, 118 aa, synthetic construct
QVQLVESGGGLVQAGGSLTLSCAASGRTFSTDVVGWFRQAPGKEREFVASISRSGDGIYYDDSVKGRFTISRNNAWNTVNLQMNNLKVEDTAVYYCAAGDGWSTYDYWGQGTQVTVSS

SEQ ID NO: 316 - protein, 126 aa, synthetic construct
QVQLVESGGGLVQAGGSLRLSCAASGRTLSRYAMGWFRQAPGKEREFVTANSWGGDTYYADSVQGRFTFSRDNAKNTVYLQMNSLQPEDTAVYYCAAAPTSFATTAYSSSNSYAYWGQGTQVTVSS

SEQ ID NO: 317 - protein, 126 aa, synthetic construct; identical to SEQ ID NO: 316

SEQ ID NO: 318 - protein, 126 aa, synthetic construct; identical to SEQ ID NO: 316

SEQ ID NO: 319 - protein, 126 aa, synthetic construct; identical to SEQ ID NO: 316

SEQ ID NO: 320 - protein, 126 aa, synthetic construct; identical to SEQ ID NO: 316

SEQ ID NO: 321 - protein, 126 aa, synthetic construct
QVQLVESGGGWVQVGESLRLSCAPSGRTFVSGIMGWFRQTPGKEREFVARIILNNNSTRYTDSVKGRFTISRDSAKNTMYLQMNTLRPEDTAVYYCAARDRYGSGNSLSPSAYDYWGQGTQVTVSS

SEQ ID NO: 322 - protein, 126 aa, synthetic construct; identical to SEQ ID NO: 316

SEQ ID NO: 323 - protein, 126 aa, synthetic construct; identical to SEQ ID NO: 321

SEQ ID NO: 324 - protein, 119 aa, synthetic construct
QLQLVESGGGLVQAGGSLTLSCAASGRTFSRDVVGWFRQAPGKEREFVASISRSGDGTFYTDSVKGRFTISSRDNAKNTVLLQMNSLKVEDTAVYYCAAGDGWSTYDYWGQGTQVTVSS

SEQ ID NO: 325 - protein, 126 aa, synthetic construct; identical to SEQ ID NO: 316

SEQ ID NO: 326 - protein, 126 aa, synthetic construct
EVQLVESGGGWVQVGESLRLSCAPSGRTFVSGIMGWFRQTPGKEREFVARIILNNNSTRYTDSVKGRFTISRDSAKNTMYLQMNTLRPEDTAVYYCAARDRYGSGNSLSPSAYDYWGQGTQVTVSS

SEQ ID NO: 327 - protein, 129 aa, synthetic construct
QVQLQESGGGLVQAGESLRLSCAASGPTASRVAVAWFRQVPGKEREFVAVVNRPGTMTKYADSVKGRFTISRDSAKNTVYLQMNSLKPEDTAVYYCAADSVPYGRPYYFQTSAGNYDYWGQGTQVTVSS

SEQ ID NO: 328 - protein, 126 aa, synthetic construct
EVQLVESGGGLVQAEGSLRLSCAASGRTLSRYAMGWFRQAPGKEREFVTANSWGGDTYYADSVQGRFTFSRDNAKNTVYLQMNSLQPEDTAVYYCAAAPTSFATTAYSSSNSYAYWGQGTQVTVSS

SEQ ID NO: 329 - protein, 126 aa, synthetic construct
QVQLVESGGGLVQAGGSLRLSCAASGRTLSRNAMGWFRQAPGKEREFVAADSWGGDTFYADSVEGRFTFSRDNAKNAVYLQMNSLQPEDTAVYYCAGAPTSFATTAYSSSNSYRYWGQGTQVTVSS

SEQ ID NO: 330 - protein, 126 aa, synthetic construct
EVQLVESGGGWVQVGESLRLSCAPSGRTFVSGIMGWFRQAPGKEREFVARIILNNNSTRYTDSVKGRFTISRDSAKNTMYLQMDSLRPEDTAVYYCAARDRYGSGNSLSPSAYDYWGQGTQVTVSS

SEQ ID NO: 331 - protein, 126 aa, synthetic construct
QLQLVESGGGLVQAGGSLRLSCAASGRTLSRYAMGWFRQAPGKEREFVAADSWGGDTFYADSVEGRFTFSRDNAKNAAYLQMNSLQPEDTATYYCAGAPTSFATTAYSSSNSYRYWGQGTQVTVSS

SEQ ID NO: 332 - protein, 129 aa, synthetic construct
QVQLVESGGGLVQAGESLRLSCAASGPTASRVAVAWFRQVPGKEREFVAVVNRPGTMTKYADSVKGRFTISRDSAKNTVYLQMNSLKPEDTAVYYCAADSVPYGRPYYFQTSAGNYDYWGQGTQVTVSS

SEQ ID NO: 333 - protein, 126 aa, synthetic construct; identical to SEQ ID NO: 313

SEQ ID NO: 334 - protein, 126 aa, synthetic construct
EVQLVESGGGWVQVGESLRLSCVPSGRTFVSGIMGWFRQAPGKEREFVARIILNSNSTRYTDSVKGRFTISRDSAKNTMYLQMNSLRPEDTAVYYCAARDRYGSGNSLSPSAYDYWGQGTQVTVSS

SEQ ID NO: 335 - protein, 126 aa, synthetic construct
QVQLVESGGGLVQAGGSLRLSCAASGRTLSRYAVGWFRQAPGKEREFVTANSWGGDTFYADSVQGRFTFSRDNAKNTVYLQMNSLLPEDAAVYYCAAAPTSFATTAYSSSNSYKVWGQGTQVTVSS

SEQ ID NO: 336 - protein, 126 aa, synthetic construct; identical to SEQ ID NO: 313

SEQ ID NO: 337 - protein, 126 aa, synthetic construct
QVQLVESGGGWVQVGESLRLSCAPSGRTFVSGIMGWFRQAPGKEREFVARIILNNNSTRYTDSVKGRFTISRDSAKDTMYLQMNTLRPEDTAVYYCAARDRYGSGNSLSPSAYDYWGQGTQVTVSS

SEQ ID NO: 338 - protein, 126 aa, synthetic construct; identical to SEQ ID NO: 316

SEQ ID NO: 339 - protein, 126 aa, synthetic construct
QVQLVESGGGLVQPGGSLRLSCAASGRTLSRYAMGWFRQAPGKEREFVTANSWGGDTYYADSVQGRFTFSRDNAKNTVYLQMNSLQPEDTAVYYCAAAPTSFATTAYSSSNSYAYWGQGTQVTVSS

SEQ ID NO: 340 - protein, 126 aa, synthetic construct
QLQLVESGGGWVQVGESLRLSCVPSGRTFVSGIMGWFRQAPGKEREFVARIILNNNSTRYTDSVKGRFTISRDSAKNTMYLQMNTLRPEDTAVYYCAARDRYGSGNSLSPSAYDYWGQGTQVTVSS

SEQ ID NO: 341 - protein, 126 aa, synthetic construct; identical to SEQ ID NO: 313

SEQ ID NO: 342 - protein, 126 aa, synthetic construct
QVQLVESGGGLVQAGGSLRLSCAASGRALSRLAMGWFRQAPGKEREFVVASSWGDDTFYADSVKGRFTFSRDNAKNTVYLQMNSLQPGDTAVYYCAAAPTSFATTAYSSSNSYAYWGQGTQVTVSS

SEQ ID NO: 343 - protein, 126 aa, synthetic construct; identical to SEQ ID NO: 316

SEQ ID NO: 344 - protein, 126 aa, synthetic construct
QLQLVESGGGWVQVGESLRLSCAPSGRTFVSGIMGWFRQAPGKEREFVARIILNNNSTRYIDSVKGRFTISRDSAKNTMYLQMDSLRPEDTAVYYCAARDRYGSGNSLSPSAYDYWGQGTQVTVSS

SEQ ID NO: 345 - protein, 126 aa, synthetic construct
EVQLVESGGGWVQVGESLRLSCAPSGRTFVSGIMGWFRQTPGKEREFVARIILNNNSTRYTDSVKGRFTISRDSAKNTLYLQMNTLRPEDTAVYYCAARDRYGSGNSLSPSAYDYWGQGTQVTVSS

SEQ ID NO: 346 - protein, 126 aa, synthetic construct
QVQLVESGGGLVQAGGSLRLSCAASGRTLSRYAMGWFRQAPGKERDFVAATSWGGDTYYADSVEGRFTFSRDNAKNAVYLQMNSLQPEDTAVYYCAAAPTSFATTAYSSSNSYAYWGQGTQVTVSS

SEQ ID NO: 347 - protein, 126 aa, synthetic construct; identical to SEQ ID NO: 313

SEQ ID NO: 348 - protein, 126 aa, synthetic construct
QVQLVESGGGWVQVGESLRLSCAPSGRTFVSGIMGWFRQAPGKEREFVARIILNNNSTRYTDSVKGRFTISRDSAKNTMYLQMNTLRPEDTAVYYCAARDRYGSGNSLSPSAYDYWGQGTQVTVSS

SEQ ID NO: 349 - protein, 126 aa, synthetic construct
QLQLVESGGGLVQAGGSLRLSCAASGRTLSRYAMGWFRQAPGKEREFVTANSWGGDTYYADSVQGRFTFSRDNAKNTVYLQMNSLQPEDTAVYYCAAAPTSFATTAYSSSNSYAYWGQGTQVTVSS

SEQ ID NO: 350 - protein, 126 aa, synthetic construct
QVQLVESGGGLVQAGGSLRLSCVASGRTLSRYAMGWFRQAPGKEREFVTANSWGGDTYYADSVQGRFTFSRDNAKNTVYLQMNSLQPEDTAVYYCAAAPTSFATTAYSSSNSYAYWGQGTQVTVSS

SEQ ID NO: 351 - protein, 129 aa, synthetic construct; identical to SEQ ID NO: 332

SEQ ID NO: 352 - protein, 126 aa, synthetic construct; identical to SEQ ID NO: 316

SEQ ID NO: 353 - protein, 126 aa, synthetic construct
QVQLVESGGGWVQVGESLRLSCAPSGRTFVSGIMGWFRQAPGKEREFVARIILNNNSTRYTDSVKGRFTISRDSAKNTMYLQMDSLRPEDTAVYYCAARDRYGSGNSLSPSAYDYWGQGTQVTVSS

SEQ ID NO: 354 - protein, 129 aa, synthetic construct
EVQLVESGGGLVQAGESLRLSCAASGPTASRVAVAWFRQVPGKEREFVAVVNRPGTMTKYADSVKGRFTISRDSAKNTVYLQMNSLKPEDTAVYYCAADSVPYGRPYYFQTSAGNYDYWGQGTQVTVSS

SEQ ID NO: 355 - protein, 129 aa, synthetic construct
QVQLVESGGGLVQAGGSLRLSCAASGRTFGAVAVGWFRQVPGKEREFVAAINRNGSATKYADSAKGRFTISRDNAESPVYLQMNSLKPEDTAIYYCAADSLPYGRPYYFQTSAGEYDYWGQGTQVTVSS

SEQ ID NO: 356 - protein, 126 aa, synthetic construct; identical to SEQ ID NO: 316

SEQ ID NO: 357 - protein, 126 aa, synthetic construct
QVQLVESGGGWVQVGESLRLSCAPSGRTFVRGIMGWFRQAPGKEREFVARIILNSNSTRYIDSVKGRFTISRDSAKNTMYLQMNSLRPEDTAVYYCAARDRYGSGNSLSPSAYDYWGQGTQVTVSS

SEQ ID NO: 358 - protein, 126 aa, synthetic construct
QVQLVESGGGLVQAGGSLRLSCAASGRTLSRYAMGWFRQAPGKEREFVTANSWGGDTYYADSVQGRSTFSRDNAKNTVYLQMNSLQPEDTAVYYCAAAPTSFATTAYSSSNSYAYWGQGTQVTVSS

SEQ ID NO: 359 - protein, 126 aa, synthetic construct
QVQLVESGGGWVQVGESLRLSCAPSGRTFVRGIMGWFRQAPGKEREFVARIILNNNSTRYTDSVKGRFTISRDSAKNTMWLQMDSLRPEDTAVYYCAARDRYGSGNSLSPSAYDYWGQGTQVTVSS

SEQ ID NO: 360 - protein, 129 aa, synthetic construct
QVQLQESGGGLVQAGGSLRLSCAASGPTFSRVAVGWFRQVPGKEREFVAAVNRPATMTKYADSVKGRFTISRDNAKNTVDLQMNSMKPEDTAVYYCAADSVPYGRPYYFQTSAGEYDYWGQGTQVTVSS

SEQ ID NO: 361 - protein, 126 aa, synthetic construct
EVQLVESGGGWVQVGESLRLSCAPSGRTFVSGIMGWFRQAPGKEREFVARIILNNNSTRYTDSVKGRFTISRDSAKNTMYLQMNTLRPEDTAVYYCAARDRYGSGNSLSPSAYDYWGQGTQVTVSS

SEQ ID NO: 362 - protein, 126 aa, synthetic construct; identical to SEQ ID NO: 361

SEQ ID NO: 363 - protein, 126 aa, synthetic construct
EVQLVESGGGWVQVGESLRLSCAPSGRTFVSGIMGWFRQAPGKEREFVARIILNNNSTRYIDSVKGRFTISRDSAKNTMYLQMDSLRPEDTAVYYCAARDRYGSGNSLSPSAYDYWGQGTQVTVSL

SEQ ID NO: 364 - protein, 126 aa, synthetic construct
QVQLQESGGGWVQVGESLRLSCVPSGRTFVSGIMGWFRQAPGKEREFVARIILNNNSTRYTDSVKGRFTISRDSAKNTMYLQMNTLRPEDTAVYYCAARDRYGSGNSLSPSAYDYWGQGTQVTVSS

SEQ ID NO: 365 - protein, 126 aa, synthetic construct; identical to SEQ ID NO: 316

SEQ ID NO: 366 - protein, 126 aa, synthetic construct
QLQLVESGGGWVQVGESLRLSCVPSGRTFVSGIMGWFRQAPGKEREFVARIISNNNSTRYTDSVKGRFTISRDSAKNTMYLQMNTLRPEDTAVYYCAARDRYGSGNSLSPSAYDYWGQGTQVTVSS

SEQ ID NO: 367 - protein, 126 aa, synthetic construct
QVQLVESGGGWVQVGESLRLSCAPSGRTFVSGIMGWFRQAPGKEREFVARIILNSNSTRYTDSAKGRFTISRDSAKNTMYLQMDSLRPEDTAVYYCAARDRYGSGNSLSPSAYDYWGQGTQVTVSS

SEQ ID NO: 368 - protein, 126 aa, synthetic construct
QVQLVESGGGLVQAGGSLRLSCAPSGRTFVSGIMGWFRQAPGKEREFVARIILNNNSTRYIDSVKGRFTISRDSAKNTMYLQMDSLRPEDTAVYYCAARDRYGSGNSLSPSAYDYWGQGTQVTVSS

SEQ ID NO: 369 - protein, 129 aa, synthetic construct; identical to SEQ ID NO: 332

SEQ ID NO: 370 - protein, 126 aa, synthetic construct
EVQLVESGGGWVQVGESLRLSCAPSGRTFVSGIMGWFRQAPGKEREFVARIILNNNSTRYIDSVKGRFTISRDSAKNTMYLQMDSLRPEDTAVYYCAARDRYGSGNSLSPSAYDYWGQGTQVTVSS

SEQ ID NO: 371 - protein, 129 aa, synthetic construct
QVQLVESGGGLVQHGGSLRLSCAASGPTFSRVAVGWFRQVPGKEREFVAVVNRPGSMTKYADSVKGRFNISRDTAKNTVYLQMNSLKPEDTAVYYCAADSVPYGRPYYFTTSAGDYDYWGQGTQVTVSS

SEQ ID NO: 372 - protein, 129 aa, synthetic construct
EVQLVESGGGLVQAGGSLRLSCAASGRTFGAVAVGWFRQVPGKEREFVAAINRSGSATKYADSVKGRFTISRDNAESPVFLQMNSLKPEDTAVYYCAADSLPYGRPYYFQTSAGEYDYWGQGTQVTVSS

SEQ ID NO: 373 - protein, 126 aa, synthetic construct; identical to SEQ ID NO: 316

SEQ ID NO: 374 - protein, 126 aa, synthetic construct
QVQLVESGGGWVQVGESLRLSCAPSGRTFVSGIMGWFRQTPGKEREFVARIILNNNSTRYTDSVKGRFTISRDSAKNTLYLQMNTLRPEDTAVYYCAARDRYGSGNSLSPSAYDYWGQGTQVTVSS

SEQ ID NO: 375 - protein, 126 aa, synthetic construct
QVQLVESGGGWVQVGESLRLSCAPSGRTFVSGIMGWFRQAPGEEREFVARIILNNNSTRYTDSVKGRFTISRDSAKNTMYLQMNTLRPEDTAVYYCAARDRYGSGNSLSPSAYDYWGQGTQVTVSS

SEQ ID NO: 376 - protein, 126 aa, synthetic construct
QVQLVESGGGWVQVGESPRLSCAPSGRTFVSGIMGWFRQTPGKEREFVARIILNNNSTRYTDSVKGRFTISRDSAKNTMYLQMNTLRPEDTAVYYCAARDRYGSGNSLSPSAYDYWGQGTQVTVSS

SEQ ID NO: 377 - protein, 126 aa, synthetic construct; identical to SEQ ID NO: 316

SEQ ID NO: 378 - protein, 126 aa, synthetic construct; identical to SEQ ID NO: 370

SEQ ID NO: 379 - protein, 126 aa, synthetic construct
QVQLVESGGGWVQVGKSLRLSCAPSGRTFVSGIMGWFRQAPGKEREFVARIILNNNSTRYIDSVKGRFTISRDSAKNTMYLQMDSLRPEDTAVYYCAARDRYGSGNSLSPSAYDYWGQGTQVTVSS

SEQ ID NO: 380 - protein, 126 aa, synthetic construct
QLQLVESGGGWVQVGESLRLSCAPSGRTFASGIMGWFRQAPGKEREFVARIILNNNSTRYTDSVKGRFTISRDSAKNTMYLQMNTLRPEDTAVYYCAARDRYGSGNSLSPSAYDYWGQGTQVTVSS

SEQ ID NO: 381 - protein, 126 aa, synthetic construct; identical to SEQ ID NO: 364

SEQ ID NO: 382 - protein, 126 aa, synthetic construct
EVQLVESGGGLVQAGDSLRLSCAASGRTLSRYAMGWFRQAPGKEREFVTANSWGGDTYYADSVQGRFTFSRDNAKNTVYLQMNSLQPEDTAVYYCAAAPTSFATTAYSSSNSYAYWGQGTQVTVSS

SEQ ID NO: 383 - protein, 126 aa, synthetic construct
QVQLVESGGGLVQAGGSLRLSCAASGRTLSRYAMGWFRQAPGKEREFVTANSWGGDTYYADSVQGRFTFTRDNAKNTVYLQMNSLQPEDTAVYYCAAAPTSFATTAYSSSNSYAYWGQGTQVTVSS

SEQ ID NO: 384 - protein, 126 aa, synthetic construct
QVQLVESGGGLVQAGDSLRLSCVASGRTLSRCAMGWFRKAPGKEREYVAISSWGGDTFYEDSVEGRFTFSRDNAKNTVYLQMNSLRPEDTAVYYCAAAPTSFATTAYSSSNSYAYWGQGTQVTVSS

SEQ ID NO: 385 - protein, 126 aa, synthetic construct
QVQLVESGGGLVQAGGSLRLSCAASGRTLSRYAMGWFRQAPGKEREFVAANSWGGDTYYTDSVEGRFTFSRDNAKNAVYLQMNSLQPGDTAVYYCAAAPTSFATTAYSSSNSYSYWGQGTQVTVSS

SEQ ID NO: 386 - protein, 126 aa, synthetic construct
QVQLQESGGGLVQAGGSLRLSCAASGRTLSRYAMGWFRQAPGKEREFVACDSWGGDTFYADSVEGRFTFSRDNAKNATYLQMNSLQPEDTAVYYCAGAPTSFATTAYSSSNSYTVWGQGTQVTVSL

SEQ ID NO: 387 - protein, 126 aa, synthetic construct; identical to SEQ ID NO: 316

SEQ ID NO: 388 - protein, 126 aa, synthetic construct
QVQLVESGGGLVQAGGSLRLFCATSGRTLSRYAMGWFRQAPGREREFVACDSWGGDTFYADSVKGRFTFSRDSAKNTVYLQMNSLQPEDTAVYYCAAAPTSFATTAYSSSNSYAYWGQGTQVTVSS

SEQ ID NO: 389 - protein, 126 aa, synthetic construct
QVQLVESGGGLVQAGGSLRLSCAASGRALSRLAMGWFRQAPGKEREFVVASSWGDDTFYADSVKGRFTFSRDNAKNTVYLQMNSLQPGDTAVYYCAAAPTSFATTAYSSSNSYAYWGQGTQVTASS

SEQ ID NO: 390 - protein, 126 aa, synthetic construct
EVQLVESGGGLVQAGGSLRLSCAASGRALSRLAMGWFRQAPGKEREFVVASSWGDDTFYADSVKGRFTFSRDNAKNTVYLQMNSLQPGDTAVYYCAAAPTSFATTAYSSSNSYAYWGQGTQVTVSS

SEQ ID NO: 391 - protein, 126 aa, synthetic construct; identical to SEQ ID NO: 326

SEQ ID NO: 392 - protein, 126 aa, synthetic construct
QVQLQESGGGLVQAGGSLRLSCAASGRALSRLAMGWFRQAPGKEREFVVASSWGDDTFYADSVKGRFTFSRDNAKNTVYLQMNSLQPGDTAVYYCAAAPTSFATTAYSSSNSYAYWGQGTQVTVSS

SEQ ID NO: 393 - protein, 126 aa, synthetic construct; identical to SEQ ID NO: 342

SEQ ID NO: 394 - protein, 126 aa, synthetic construct; identical to SEQ ID NO: 316

SEQ ID NO: 395 - protein, 126 aa, synthetic construct; identical to SEQ ID NO: 342

SEQ ID NO: 396 - protein, 126 aa, synthetic construct
EVQLVESGGGLVQAGGSLRLSCAASGRTLSRYAMGWFRQAPGKEREYVAIDSWGGDTFYADSVEGRFTFSRDNAKNEVYLQMNSLQPEDTAVYYCAGAPTSFATTAYSSSNSYRYWGQGTQVTVSS

SEQ ID NO: 397 - protein, 126 aa, synthetic construct; identical to SEQ ID NO: 390

SEQ ID NO: 398 - protein, 126 aa, synthetic construct; identical to SEQ ID NO: 313

SEQ ID NO: 399 - protein, 126 aa, synthetic construct; identical to SEQ ID NO: 316

SEQ ID NO: 400 - protein, 126 aa, synthetic construct; identical to SEQ ID NO: 316

SEQ ID NO: 401 - protein, 126 aa, synthetic construct
QVQLVESGGGLVQTGGSLRLSCAASGRTLSRYAMGWFRQAPGKEREFVTANSWGGDTYYADSVQGRFTFSRDNAKNTVYLQMNSLQPEDTAVYYCAAAPTSFATTAYSSSNSYAYWGQGTQVTVSS

SEQ ID NO: 402 - protein, 126 aa, synthetic construct; identical to SEQ ID NO: 316

SEQ ID NO: 403 - protein, 126 aa, synthetic construct
QVQLVESGGGLVQAGGSLRLSCAASGRTLSRYAMGWFRQGPGKEREFVAADSWGGDTYYDDSVEGRFTFSRDITKNAVYLQMNSLQPEDTAVYYCAAAPTSFATTAYSSSNSYAYWGQGTQVTVSS

SEQ ID NO: 404 - protein, 126 aa, synthetic construct; identical to SEQ ID NO: 313

SEQ ID NO: 405 - protein, 126 aa, synthetic construct
QVQLVESGGGVVQAGGSLRLSCAASGRTLSRYAMGWFRQAPGKEREFVTANSWGGDTYYADSVQGRFTFSRDNAKNTVYLQMNSLQPEDTAVYYCAAAPTSFATTAYSSSNSYAYWGQGTQVTVSS

SEQ ID NO: 406 - protein, 126 aa, synthetic construct
EVQLVESGGGLVQAGGSLRLSCAASGRTLSRYAMGWFRQGPGKEREFVAADSWGGDTYYDDSVEGRFTFSRDITKNAVYLQMNSLQPEDTAVYYCAAAPTSFATTAYSSSNSYAYWGQGTQVTVSS

SEQ ID NO: 407 - protein, 126 aa, synthetic construct
QVQLVESGGGLVQAGDSLRLSCEASGRTLSRYAMGWFRQAPGKEREFVTANSWGGDTYYADSVQGRFTFSRDNAKNTVYLQMNSLQPEDTAVYYCAAAPTSFATTAYSSSNSYAYWGQGTQVTVSS

SEQ ID NO: 408 - protein, 126 aa, synthetic construct; identical to SEQ ID NO: 313

SEQ ID NO: 409 - protein, 126 aa, synthetic construct; identical to SEQ ID NO: 313

SEQ ID NO: 410 - protein, 126 aa, synthetic construct
QVQLVESGGGLVQAGGSLRLSCAASGRTLSRYAMGWFRQAPGKEREFVAAMSWGGDTFYADSVEGRFTFSRDNAEIAVYLQMNSLQPEDTAVYYCAAAPTSFATTAYSSSNSYAYWGQGTQVTVSH

SEQ ID NO: 411 - protein, 126 aa, synthetic construct; identical to SEQ ID NO: 313

SEQ ID NO: 412 - protein, 126 aa, synthetic construct; identical to SEQ ID NO: 316

SEQ ID NO: 413 - protein, 126 aa, synthetic construct
EVQLVESGGGLVQPGGSLRLSCAASGRALSRLAMGWFRQAPGKEREFVVASSWGDDTFYADSVKGRFTFSRDNAKNTVYLQMNSLQPGDTAVYYCAAAPTSFATTAYSSSNSYAYWGQGTQVTVSS

SEQ ID NO: 414 - protein, 126 aa, synthetic construct; identical to SEQ ID NO: 329

SEQ ID NO: 415 - protein, 126 aa, synthetic construct; identical to SEQ ID NO: 313

SEQ ID NO: 416 - protein, 126 aa, synthetic construct
EVQLVESGGGLVQAGGSLRLSCAASGRTLSRYAMGWFRQAPGREREFVTANSWGGDTYYADSVQGRFTFSRDNAKNTVYLQMNSLQPEDTAVYYCAAAPTSFATTAYSSSNSYAYWGQGTQVTVSS

SEQ ID NO: 417 - protein, 126 aa, synthetic construct
QVQLVESGGGLVQAGGSLRLSCAASGRTLSRYAMGWFRQAPGKEREFVAADSWGGDTYYADSVEGRFTFSRDNANNAVYLQMNSLQPEDTAVYYCAAAPTSFATTAYSSSNSYAYWGQGTQVTVSS

SEQ ID NO: 418 - protein, 126 aa, synthetic construct; identical to SEQ ID NO: 385

SEQ ID NO: 419 - protein, 126 aa, synthetic construct; identical to SEQ ID NO: 339

SEQ ID NO: 420 - protein, 126 aa, synthetic construct; identical to SEQ ID NO: 313

SEQ ID NO: 421 - protein, 126 aa, synthetic construct
QVQLVESGGGLVQAGGSLRLSCAASGRTLSRYAMGWFRQAPGKEREFVTANSWGGDTYYADSVQGRFTFSRDNAENTVYLQMNSLQPEDTAVYYCAAAPTSFATTAYSSSNSYAYWGQGTQVTVSS

SEQ ID NO: 422 - protein, 126 aa, synthetic construct; identical to SEQ ID NO: 313

SEQ ID NO: 423 - protein, 126 aa, synthetic construct; identical to SEQ ID NO: 316

SEQ ID NO: 424 - protein, 126 aa, synthetic construct; identical to SEQ ID NO: 342

SEQ ID NO: 425 - protein, 126 aa, synthetic construct; identical to SEQ ID NO: 316

SEQ ID NO: 426 - protein, 126 aa, synthetic construct
QVQLVESGGGLVQAGGSLRLSCAASGRSLSRYAMGWFRQAPGKEREFVAAISWGGDSFYTDSVEGRFTFSRDNAKNAVYLEMNDLQPEDTAVYYCAAAPTSFPTTAYSSSNSYSYWGRGTQVTVSS

SEQ ID NO: 427 - protein, 126 aa, synthetic construct; identical to SEQ ID NO: 316

SEQ ID NO: 428 - protein, 126 aa, synthetic construct
EVQLVESGGGLVQAGGSLRLSCAASGRTLSRYAMGWFRQAPGSEREFVAASSWGGDTFYADSVEGRFTFSRDNAKNAVYLQMNSLQPEDTAAYYCAAAPTSFPTTAYSSSNSYAYWGQGTQVTVSS

SEQ ID NO: 429 - protein, 126 aa, synthetic construct; identical to SEQ ID NO: 313

SEQ ID NO: 430 - protein, 126 aa, synthetic construct; identical to SEQ ID NO: 316

SEQ ID NO: 431 - protein, 126 aa, synthetic construct
QVQLVESGGGLVQAGDSLRLSCAASGRTLSRYAMGWFRQAPGKEREFVAATSWGGDSYYADSVEGRFTFSRDNAKNAVYLQMNSLQPEDTAVYYCAAAPTSFATTAYSSSNSYANWGQGTQVTVSS

SEQ ID NO: 432 - protein, 126 aa, synthetic construct; identical to SEQ ID NO: 316

SEQ ID NO: 433 - protein, 126 aa, synthetic construct
EVQLVESGGGSVQPGGSLRLSCAASGRTLSRYAMGWFRQAPGKEREFVTANSWGGDTYYADSVQGRFTFSRDNAKNTVYLQMNSLQPEDTAVYYCAAAPTSFATTAYSSSNSYAYWGQGTQVTVSS

SEQ ID NO: 434 - protein, 126 aa, synthetic construct; identical to SEQ ID NO: 316

SEQ ID NO: 435 - protein, 126 aa, synthetic construct; identical to SEQ ID NO: 349

SEQ ID NO: 436 - protein, 126 aa, synthetic construct
QVQLVESGGGLVQAGGSLRLSCAASGRTLSRYAMGWFRQAPGKEREFVAADSWGGDTYYDDSVEGRFTFSRDIAKNAVYLQMNSLQPEDTAVYYCAAAPTSFATTAYSSSNSYAYWGQGTQVTVSS

SEQ ID NO: 437 - protein, 126 aa, synthetic construct
QVQLVESGGGLVQAGGSLRLSCAASGRTLSRDAMGWFRQAPGKEREFVAADSWGGDTFYADSVEGRFTFSRDNAKNAVYLQMNSLQPEDTAVYYCAGAPTSFATTAYSSSNSYRYWGQGTQVTVSS

SEQ ID NO: 438 - protein, 126 aa, synthetic construct
QVQLVESGGGLVQAGGSLRLSCAASGRTLSRYAMGWFRQAPGREREFVTANSWGGDTYYADSVQGRFTFSRDNAKNTVYLQMSSLQPEDTAVYYCAAAPTSFATTAYSSSNSYAYWGQGTQVTVSS

SEQ ID NO: 439 - protein, 126 aa, synthetic construct; identical to SEQ ID NO: 316

SEQ ID NO: 440 - protein, 126 aa, synthetic construct; identical to SEQ ID NO: 342

SEQ ID NO: 441 - protein, 126 aa, synthetic construct; identical to SEQ ID NO: 342

SEQ ID NO: 442 - protein, 126 aa, synthetic construct; identical to SEQ ID NO: 37

SEQ ID NO: 443 - protein, 126 aa, synthetic construct; identical to SEQ ID NO: 313

SEQ ID NO: 444 - protein, 126 aa, synthetic construct
QVQLQESGGGLVQAGGSLRLSCAASGRTLSRYAMGWFRQAPGKEREFVTANSWGGDTYYADSVQGRFTFSRDNAKNTVYLQMNSLQPEDTAVYYCAAAPTSFATTAYSSSNSYAYWGQGTQVTVSS

SEQ ID NO: 445 - protein, 126 aa, synthetic construct
QVQLQESGGGLVQAGGSLRLSCAASGRTLSRVAMGWFRQAPGKEREFVAADSWGGDTFYADSVEGRFTFSRDNAKNAVYLQMNSLQPEDTAVYFCAGAPASFATTAYSSSNSYSYWGQGTQVTVSS

SEQ ID NO: 446 - protein, 126 aa, synthetic construct
QVQLVESGGGLVQAGGSLRLSCAASGRTLSRYAMGWFRQAPGKEREFVAANSWGGDTYYTDSVEGRFTFSRDNAKNAVYLQMNSLQPEDTAVYYCAAAPTSFATTAYSSSNSYTYWGQGTQVTVSS

SEQ ID NO: 447 - protein, 126 aa, synthetic construct; identical to SEQ ID NO: 36

SEQ ID NO: 448 - protein, 126 aa, synthetic construct
QVQLVESGGGLVQAGGSLRLSCAASGRTLSRYAMGWFRQAPGKEREFVAADSWGGDTFYADSVEGRFTFSRDNAKNAAYLQMNSLQPEDTATYYCAGAPTSFATTAYSSSNSYRYWGQGTQVTVSS

SEQ ID NO: 449 - protein, 126 aa, synthetic construct; identical to SEQ ID NO: 38

SEQ ID NO: 450 - protein, 126 aa, synthetic construct; identical to SEQ ID NO: 436

SEQ ID NO: 451 - protein, 126 aa, synthetic construct; identical to SEQ ID NO: 316

SEQ ID NO: 452 - protein, 126 aa, synthetic construct; identical to SEQ ID NO: 386

SEQ ID NO: 453 - protein, 126 aa, synthetic construct; identical to SEQ ID NO: 37

SEQ ID NO: 454 - protein, 126 aa, synthetic construct; identical to SEQ ID NO: 390

SEQ ID NO: 455 - protein, 126 aa, synthetic construct
QVQLVESGGGLVQAGGSLRLSCAASGRALSRLAMGWFRQAPGKEREFVVASSWGDDTFYADSVEGRFTFSRDNAKSTVYLQMNSLQPGDTAVYYCAAAPTSFATTAYSSSNSYAYWGQGTQVTVPS

SEQ ID NO: 456 - protein, 126 aa, synthetic construct
QVQLVESGGGLVQAGASLRLSCAASGRTLSRYAMGWFRQAPGKEREFVAASSWGGDTYYADSVEGRFTFSRDNAKNAVYLQMNSLQPEDTAVYYCAGAPTSFATTAYSSSNSYAYWGQGTQVTVSS

SEQ ID NO: 457 - protein, 126 aa, synthetic construct; identical to SEQ ID NO: 316

SEQ ID NO: 458 - protein, 126 aa, synthetic construct
QVQLVESGGGLVQAGGSLRLSCAASGRTLSRLAMGWFRQAPGKEREFVAVNSWGGDTFYADSVEGRFTYSRDNAKSAVYLQMNSLQPEDTAVYYCAAAPTSFATTAYSSSNSYAYWGQGTQVTVSS

SEQ ID NO: 459 - protein, 126 aa, synthetic construct; identical to SEQ ID NO: 444

SEQ ID NO: 460 - protein, 126 aa, synthetic construct
QVQLVESGGGLVQPGGSLRLSCAASGRTLSRYAMGWFRQAPGKDREFVAASSWGGDTFYADSVEGRFTFSRDNAENATYLQMNSLQPEDTAVYYCAAAPTSFATTAYSSSNSYGSWGQGTQVTVSS

SEQ ID NO: 461 - protein, 126 aa, synthetic construct
QVQLQESGGGLVQAGGSLRLSCAASGRTLSRYAMGWFRQAPGSEREFVAASSWGGDTFYADSVEGRFTFSRDNAKNAVYLQMNSLQPEDTAAYYCAAAPTSFPTTAYSSSNSYAYWGQGTQVTVSS

SEQ ID NO: 462 - protein, 126 aa, synthetic construct; identical to SEQ ID NO: 396

SEQ ID NO: 463 - protein, 126 aa, synthetic construct; identical to SEQ ID NO: 38

SEQ ID NO: 464 - protein, 126 aa, synthetic construct; identical to SEQ ID NO: 342

SEQ ID NO: 465 - protein, 126 aa, synthetic construct
QVQLVESGGGLVQAGGSLRLSCAASGRTLSRYAMGWFRQAPGKEREFVTANSWGGDTYYTDSVEGRFTFSRDNAKNAVYLQMNSLQPEDTAVYYCAAAPTSFATTAYSSSNSYTYWGQGTQVTVSS

SEQ ID NO: 466 - protein, 126 aa, synthetic construct
EVQLVESGGGLVQAGDSLRLSCVASGRTLSRCAMGWFRKAPGKEREYVAISSWGGDTFYEDSVEGRFTFSRDNAKNTVYLQMNSLRPEDTAVYYCAAAPTSFATTAYSSSNSYAYWGQGTQVTVSS

SEQ ID NO: 467 - protein, 5 aa, synthetic construct
THNMG

SEQ ID NO: 468 - protein, 17 aa, synthetic construct
AISWNVDNTLYADSVKG

SEQ ID NO: 469 - protein, 18 aa, synthetic construct
DNIPLSSDVAATATEYDY

SEQ ID NO: 470 - protein, 5 aa, synthetic construct
NNFMS

SEQ ID NO: 471 - protein, 17 aa, synthetic construct
TISYGGESTTYAESVKG

SEQ ID NO: 472 - protein, 11 aa, synthetic construct
ATSYDSIRSGS

SEQ ID NO: 473 - protein, 5 aa, synthetic construct
SYSMA

SEQ ID NO: 474 - protein, 17 aa, synthetic construct
AISSSGVVTHVLDSVKG

SEQ ID NO: 475 - protein, 14 aa, synthetic construct
TASSYSTYEANYNY

SEQ ID NO: 476 - protein, 5 aa, synthetic construct
TRNMG

SEQ ID NO: 477 - protein, 17 aa, synthetic construct
AVSWNVDNKLYADSVKG

SEQ ID NO: 478 - protein, 18 aa, synthetic construct
DNIPLSSDMRPTATEYDY

SEQ ID NO: 479 - protein, 5 aa, synthetic construct
TWSMA

SEQ ID NO: 480 - protein, 17 aa, synthetic construct
RINVSGSVTYYADFVKG

SEQ ID NO: 481 - protein, 12 aa, synthetic construct
DRTGVGTNDYNY

SEQ ID NO: 482 - protein, 5 aa, synthetic construct
SYAMG

SEQ ID NO: 483 - protein, 17 aa, synthetic construct
VISWNVDNTEYTDSVKG

SEQ ID NO: 484 - protein, 18 aa, synthetic construct
DSIPLSSDMSPTATEYGY

SEQ ID NO: 485 - protein, 5 aa, synthetic construct
MYNMG

SEQ ID NO: 486 - protein, 17 aa, synthetic construct
ATGWSGANTPYADSVKG

SEQ ID NO: 487 - protein, 18 aa, synthetic construct
DSIRLRSDVTRIPLEYDY

SEQ ID NO: 488 - protein, 5 aa, synthetic construct
NNFMS

SEQ ID NO: 489 - protein, 17 aa, synthetic construct
TISYGGESTTYAEAVKG

SEQ ID NO: 490 - protein, 11 aa, synthetic construct
ATSYTSIRGAP

SEQ ID NO: 491 - protein, 5 aa, synthetic construct
TYNMG

SEQ ID NO: 492 - protein, 17 aa, synthetic construct
GTLWSGGDSVYADFAKG

SEQ ID NO: 493 - protein, 16 aa, synthetic construct
DPLSLTSDWRVDELSS

SEQ ID NO: 494 - protein, 5 aa, synthetic construct
NYAMG

SEQ ID NO: 495 - protein, 17 aa, synthetic construct
ARDLEGIITRYGDSVKG

SEQ ID NO: 496 - protein, 17 aa, synthetic construct
RDGGVVAGSRSSAQYNY

SEQ ID NO: 497 - protein, 5 aa, synthetic construct
GYAIG

SEQ ID NO: 498 - protein, 17 aa, synthetic construct
YITGSDGTTYYINSVKG

SEQ ID NO: 499 - protein, 21 aa, synthetic construct
DRLGSQGRYASAWWRSGDMDL

SEQ ID NO: 500 - protein, 5 aa, synthetic construct
GYAIG

SEQ ID NO: 501 - protein, 17 aa, synthetic construct
YITGSDGSTYYADSVKG

SEQ ID NO: 502 - protein, 21 aa, synthetic construct
DRLGSRGAYVPIWWRSSDMDL

SEQ ID NO: 503 - protein, 5 aa, synthetic construct
WHAMG

SEQ ID NO: 504 - protein, 17 aa, synthetic construct
TITWTGRDTYYADSVRG

SEQ ID NO: 505 - protein, 16 aa, synthetic construct
ARERATWAYSEDDCDY

SEQ ID NO: 506 - protein, 5 aa, synthetic construct
NDVMG

SEQ ID NO: 507 - protein, 16 aa, synthetic construct
DMDDTGSTEYADSVKG

SEQ ID NO: 508 - protein, 11 aa, synthetic construct
GLWIKGRHFDY

SEQ ID NO: 509 - protein, 5 aa, synthetic construct
NYAMS

SEQ ID NO: 510 - protein, 17 aa, synthetic construct
SITGFGRGTDYADSVKG

SEQ ID NO: 511 - protein, 17 aa, synthetic construct
YSSSTYYPPTPARGRDY

SEQ ID NO: 512 - protein, 5 aa, synthetic construct
NYPVG

SEQ ID NO: 513 - protein, 17 aa, synthetic construct
AITWISGSTLYADSVKG

SEQ ID NO: 514 - protein, 14 aa, synthetic construct
ALKTITRGQNDYSY

SEQ ID NO: 515 - protein, 5 aa, synthetic construct
INGMA

SEQ ID NO: 516 - protein, 16 aa, synthetic construct
AISRVGNTAYGDSVKG

SEQ ID NO: 517 - protein, 8 aa, synthetic construct
DSWGGDDY

SEQ ID NO: 518 - protein, 5 aa, synthetic construct
SYGIG

SEQ ID NO: 519 - protein, 17 aa, synthetic construct
CMSRSDDRTYYADSVKG

SEQ ID NO: 520 - protein, 16 aa, synthetic construct
VDAYGCSLVQPTTYDF

SEQ ID NO: 521 - protein, 5 aa, synthetic construct
RDAMA

SEQ ID NO: 522 - protein, 17 aa, synthetic construct
LISWSGATTNYADSVKG

SEQ ID NO: 523 - protein, 18 aa, synthetic construct
DRRPMGSRSYFEPTEYDD

SEQ ID NO: 524 - protein, 5 aa, synthetic construct
SYAMG

SEQ ID NO: 525 - protein, 17 aa, synthetic construct
AITWTKRSTDFPDSVKG

SEQ ID NO: 526 - protein, 14 aa, synthetic construct
ARGLPVTPLGDIIY

SEQ ID NO: 527 - protein, 5 aa, synthetic construct
INAMG

SEQ ID NO: 528 - protein, 17 aa, synthetic construct
AISRSGGSTVYVDGVKG

SEQ ID NO: 529 - protein, 17 aa, synthetic construct
TMAVGWTTRWRTADFDS

SEQ ID NO: 530 - protein, 5 aa, synthetic construct
INAMA

SEQ ID NO: 531 - protein, 17 aa, synthetic construct
AISRDGGASVYRDSVKG

SEQ ID NO: 532 - protein, 17 aa, synthetic construct
TRAIGWTARWITTDFDF

SEQ ID NO: 533 - protein, 5 aa, synthetic construct
RYTMA

SEQ ID NO: 534 - protein, 17 aa, synthetic construct
SVTDSGRTTDYVHSVKG

SEQ ID NO: 535 - protein, 14 aa, synthetic construct
NTDYFQIKSLDANT

SEQ ID NO: 536 - protein, 5 aa, synthetic construct
NANMA

SEQ ID NO: 537 - protein, 17 aa, synthetic construct
LITWSSGSTLYADSVKG

SEQ ID NO: 538 - protein, 17 aa, synthetic construct
DGPPYSGTYYRYDTYDY

SEQ ID NO: 539 - protein, 5 aa, synthetic construct
TTYIA

SEQ ID NO: 540 - protein, 17 aa, synthetic construct
YISPRFSHTWYADSVKG

SEQ ID NO: 541 - protein, 14 aa, synthetic construct
REHSGSTAWEHYDH

SEQ ID NO: 542 - protein, 5 aa, synthetic construct
RYTMA

SEQ ID NO: 543 - protein, 17 aa, synthetic construct
SVTDSGRTTEYVDSVKG

SEQ ID NO: 544 - protein, 14 aa, synthetic construct
NTDYFQIRSLDLNT

SEQ ID NO: 545 - protein, 5 aa, synthetic construct
TDVVG

SEQ ID NO: 546 - protein, 17 aa, synthetic construct
SISRSGDGIYYDDSVKG

SEQ ID NO: 547 - protein, 9 aa, synthetic construct
GDGWSTYDY

SEQ ID NO: 548 - protein, 5 aa, synthetic construct
RYAMG

SEQ ID NO: 549 - protein, 16 aa, synthetic construct
ANSWGGDTYYADSVQG

SEQ ID NO: 550 - protein, 18 aa, synthetic construct
APTSFATTAYSGSNSYAY

SEQ ID NO: 551 - protein, 5 aa, synthetic construct
NYYMG

SEQ ID NO: 552 - protein, 17 aa, synthetic construct
GIIWNGDHTAYADSIKG

SEQ ID NO: 553 - protein, 17 aa, synthetic construct
TFWIERATTPDIGQYAY

SEQ ID NO: 554 - protein, 5 aa, synthetic construct
RGIMG

SEQ ID NO: 555 - protein, 17 aa, synthetic construct
RIIWHINSTRYADSVKG

SEQ ID NO: 556 - protein, 17 aa, synthetic construct
RDRYGSGNSLSPSAYDY

SEQ ID NO: 557 - protein, 5 aa, synthetic construct
GYALG

SEQ ID NO: 558 - protein, 17 aa, synthetic construct
RINWSGSFTYYASSVKG

SEQ ID NO: 559 - protein, 12 aa, synthetic construct
DNPSTLATDYDN

SEQ ID NO: 560 - protein, 5 aa, synthetic construct
STAVG

SEQ ID NO: 561 - protein, 17 aa, synthetic construct
AINRSGSATTYADSVKG

SEQ ID NO: 562 - protein, 20 aa, synthetic construct
DSLPYGRPYYFQRSAGEYDY

SEQ ID NO: 563 - protein, 5 aa, synthetic construct
RVAVG

SEQ ID NO: 564 - protein, 17 aa, synthetic construct
AVNRPATMTKYADSVKG

SEQ ID NO: 565 - protein, 20 aa, synthetic construct
DSVPYGRPYYWQTSAGDYDY

SEQ ID NO: 566 - protein, 5 aa, synthetic construct
RLAMG

SEQ ID NO: 567 - protein, 16 aa, synthetic construct
VNSWGGDTFYADSVEG

SEQ ID NO: 568 - protein, 18 aa, synthetic construct
APTSFATTAYSSSNSYAY

SEQ ID NO: 569 - protein, 5 aa, synthetic construct
SYAMG

SEQ ID NO: 570 - protein, 17 aa, synthetic construct
AISRSGRSTNYADSVKG

SEQ ID NO: 571 - protein, 17 aa, synthetic construct
GRYYNSAYDPSPGDFGS

SEQ ID NO: 572 - protein, 5 aa, synthetic construct
RYAMG

SEQ ID NO: 573 - protein, 16 aa, synthetic construct
ASSWGGDTFYADSVEG

SEQ ID NO: 574 - protein, 18 aa, synthetic construct
APTSFPTTAYSSSNSYAY

SEQ ID NO: 575 - protein, 5 aa, synthetic construct
RYAMG

SEQ ID NO: 576 - protein, 16 aa, synthetic construct
IDSWGGDTFYADSVEG

SEQ ID NO: 577 - protein, 18 aa, synthetic construct
APTSFATTAYSSSNSYRY

SEQ ID NO: 578 - protein, 5 aa, synthetic construct
RDAMG

SEQ ID NO: 579 - protein, 16 aa, synthetic construct
VMSWGGDTFYTDSVEG

SEQ ID NO: 580 - protein, 18 aa, synthetic construct
APTSFATTAYSSSNSYSY

SEQ ID NO: 581 - protein, 5 aa, synthetic construct
NYILA

SEQ ID NO: 582 - protein, 16 aa, synthetic construct
AISWLDGTLYADSVED

SEQ ID NO: 583 - protein, 15 aa, synthetic construct
DRGPVRPVLAPDVDY

SEQ ID NO: 584 - protein, 5 aa, synthetic construct
NYVMG

SEQ ID NO: 585 - protein, 16 aa, synthetic construct
VITSLGGTVYADSVAN

SEQ ID NO: 586 - protein, 15 aa, synthetic construct
DRGPARYISASDVDY

SEQ ID NO: 587 - protein, 5 aa, synthetic construct
THNMG

SEQ ID NO: 588 - protein, 17 aa, synthetic construct
AISWNVDNTLYADSVKG

SEQ ID NO: 589 - protein, 18 aa, synthetic construct
DNIPLSSDVRATATEFGY

SEQ ID NO: 590 - protein, 5 aa, synthetic construct
NYILA

SEQ ID NO: 591 - protein, 16 aa, synthetic construct
AISWLDGTLYADSVED

SEQ ID NO: 592 - protein, 15 aa, synthetic construct
DRGPVRPVLAPDVDY

SEQ ID NO: 593 - protein, 5 aa, synthetic construct
THNMG

SEQ ID NO: 594 - protein, 17 aa, synthetic construct
AISWNIDNKLYADSVKG

SEQ ID NO: 595 - protein, 18 aa, synthetic construct
DKIPLSSDVAATATEYDD

SEQ ID NO: 596 - protein, 5 aa, synthetic construct
RYAVG

SEQ ID NO: 597 - protein, 17 aa, synthetic construct
AINSSGANTYVLDSVKG

SEQ ID NO: 598 - protein, 14 aa, synthetic construct
TSSSYSTYEANYNV

SEQ ID NO: 599 - protein, 5 aa, synthetic construct
NNFMS

SEQ ID NO: 600 - protein, 17 aa, synthetic construct
TISYGGESTTYAESVKG

SEQ ID NO: 601 - protein, 11 aa, synthetic construct
ATSYDSIRSGS

SEQ ID NO: 602 - protein, 5 aa, synthetic construct
NNFMS

SEQ ID NO: 603 - protein, 17 aa, synthetic construct
TISYGGESTTYAESVKG

SEQ ID NO: 604 - protein, 11 aa, synthetic construct
ATSYDSIRSGS

SEQ ID NO: 605 - protein, 5 aa, synthetic construct
NNFMS

SEQ ID NO: 606 - protein, 17 aa, synthetic construct
TISYGGESTTYAESVKG

SEQ ID NO: 607 - protein, 11 aa, synthetic construct
ATSYDSVRSGS

SEQ ID NO: 608 - protein, 5 aa, synthetic construct
NYILA

SEQ ID NO: 609 - protein, 16 aa, synthetic construct
AISWLDGTLYADSVED

SEQ ID NO: 610 - protein, 15 aa, synthetic construct
DQGPVRPVLAPDVDY

SEQ ID NO: 611 - protein, 5 aa, synthetic construct
NYVMG

SEQ ID NO: 612 - protein, 16 aa, synthetic construct
VITWLGGTLDADSVAD

SEQ ID NO: 613 - protein, 15 aa, synthetic construct
DRGPARYISASDVDY

SEQ ID NO: 614 - protein, 5 aa, synthetic construct
NYILA

SEQ ID NO: 615 - protein, 16 aa, synthetic construct
AISWLDGTFYANSVEG

SEQ ID NO: 616 - protein, 15 aa, synthetic construct
DRGPVRPVLAPDVDY

SEQ ID NO: 617 - protein, 5 aa, synthetic construct
NNFMS

SEQ ID NO: 618 - protein, 17 aa, synthetic construct
TISYFGDSTRYAESVKG

SEQ ID NO: 619 - protein, 11 aa, synthetic construct
ATSYDSIRSGS

SEQ ID NO: 620 - protein, 5 aa, synthetic construct
THNMG

SEQ ID NO: 621 - protein, 17 aa, synthetic construct
VISWNVDNKLYADSVKG

SEQ ID NO: 622 - protein, 18 aa, synthetic construct
DNIPLSSDVRATATEFGY

SEQ ID NO: 623 - protein, 5 aa, synthetic construct
NNFMS

SEQ ID NO: 624 - protein, 17 aa, synthetic construct
TISYFGDSTTYAESVKG

SEQ ID NO: 625 - protein, 11 aa, synthetic construct
ATSYDSIRSGS

SEQ ID NO: 626 - protein, 5 aa, synthetic construct
RYAVG

SEQ ID NO: 627 - protein, 17 aa, synthetic construct
AIDLSGTNTHVLDSVKG

SEQ ID NO: 628 - protein, 14 aa, synthetic construct
TSSSYSDYEANYNI

SEQ ID NO: 629 - protein, 5 aa, synthetic construct
NYILA

SEQ ID NO: 630 - protein, 16 aa, synthetic construct
AISWLEGTLYADSVED

SEQ ID NO: 631 - protein, 15 aa, synthetic construct
DRGPVRPVLAPDVDY

SEQ ID NO: 632 - protein, 5 aa, synthetic construct
QHNMG

SEQ ID NO: 633 - protein, 17 aa, synthetic construct
AISWNVGSTYFADSVKG

SEQ ID NO: 634 - protein, 18 aa, synthetic construct
DNIPLASDMRATATAYGY

SEQ ID NO: 635 - protein, 5 aa, synthetic construct
NYILA

SEQ ID NO: 636 - protein, 16 aa, synthetic construct
AISWLDGTLYADSVEG

SEQ ID NO: 637 - protein, 15 aa, synthetic construct
DRGPVRPVLAPDVDY

SEQ ID NO: 638 - protein, 5 aa, synthetic construct
GYAMA

SEQ ID NO: 639 - protein, 17 aa, synthetic construct
AISSSGIVTHVLDSVKG

SEQ ID NO: 640 - protein, 14 aa, synthetic construct
TASSYSDYEANYNY

SEQ ID NO: 641 - protein, 5 aa, synthetic construct
TRNMG

SEQ ID NO: 642 - protein, 17 aa, synthetic construct
AVSWNVDNKLYAGSVKG

SEQ ID NO: 643 - protein, 18 aa, synthetic construct
DNIPLSSDMRPTATEYDY

SEQ ID NO: 644 - protein, 5 aa, synthetic construct
NYVMG

SEQ ID NO: 645 - protein, 16 aa, synthetic construct
VITSLGGTLDADSVAD

SEQ ID NO: 646 - protein, 15 aa, synthetic construct
DRGPARYISASDVDY

SEQ ID NO: 647 - protein, 5 aa, synthetic construct
THNMG

SEQ ID NO: 648 - protein, 17 aa, synthetic construct
AISWNVDNKLYANSVKG

SEQ ID NO: 649 - protein, 18 aa, synthetic construct
DNIPLSSDMRATATEYDV

SEQ ID NO: 650 - protein, 5 aa, synthetic construct
NNFMS

SEQ ID NO: 651 - protein, 17 aa, synthetic construct
TISYGGESTTYAESVKG

SEQ ID NO: 652 - protein, 11 aa, synthetic construct
ATSYDSIRSGS

SEQ ID NO: 653 - protein, 5 aa, synthetic construct
NYILA

SEQ ID NO: 654 - protein, 16 aa, synthetic construct
AISWLDGTLYADSVED

SEQ ID NO: 655 - protein, 15 aa, synthetic construct
DRGPVRPVLAPDVDY

SEQ ID NO: 656 - protein, 5 aa, synthetic construct
RYAVG

SEQ ID NO: 657 - protein, 17 aa, synthetic construct
AIDLSGTNTHVLDSVKG

SEQ ID NO: 658 - protein, 14 aa, synthetic construct
TSSSYSDYEANYNI

SEQ ID NO: 659 - protein, 5 aa, synthetic construct
DHTMA

SEQ ID NO: 660 - protein, 17 aa, synthetic construct
ARDWSDIITRYASSVKG

SEQ ID NO: 661 - protein, 17 aa, synthetic construct
REGGVVAGVRSGAPYDY

SEQ ID NO: 662 - protein, 5 aa, synthetic construct
THNMG

SEQ ID NO: 663 - protein, 17 aa, synthetic construct
VISWNVDSTEYTDSVKG

SEQ ID NO: 664 - protein, 18 aa, synthetic construct
DNIPLSSDMSPTAAEYGY

SEQ ID NO: 665 - protein, 5 aa, synthetic construct
TRNMG

SEQ ID NO: 666 - protein, 17 aa, synthetic construct
AVSWNVDNKLYAGSVKG

SEQ ID NO: 667 - protein, 18 aa, synthetic construct
DNIPLSSDMRPTATEYDY

SEQ ID NO: 668 - protein, 5 aa, synthetic construct
NYIMA

SEQ ID NO: 669 - protein, 16 aa, synthetic construct
AISWLDGTLYADSVED

SEQ ID NO: 670 - protein, 15 aa, synthetic construct
DRGPVRPVLAPDVDY

SEQ ID NO: 671 - protein, 5 aa, synthetic construct
NNFMS

SEQ ID NO: 672 - protein, 17 aa, synthetic construct
TISYFGDSTRYAESVKG

SEQ ID NO: 673 - protein, 11 aa, synthetic construct
ATSYDSIRSGS

SEQ ID NO: 674 - protein, 5 aa, synthetic construct
NYILA

SEQ ID NO: 675 - protein, 16 aa, synthetic construct
AISWLDGTLYADSVED

SEQ ID NO: 676 - protein, 15 aa, synthetic construct
DRGPVRPVLAPDVDY

SEQ ID NO: 677 - protein, 5 aa, synthetic construct
DHTMA

SEQ ID NO: 678 - protein, 17 aa, synthetic construct
ARDWSDIITRYASSVKG

SEQ ID NO: 679 - protein, 17 aa, synthetic construct
REGGVVAGVRSGAPYDY

SEQ ID NO: 680 - protein, 5 aa, synthetic construct
THNMG

SEQ ID NO: 681 - protein, 17 aa, synthetic construct
AISWNVDNTLYADSVKG

SEQ ID NO: 682 - protein, 18 aa, synthetic construct
DNIPLSSDVRATATEFGY

SEQ ID NO: 683 - protein, 5 aa, synthetic construct
NYILA

SEQ ID NO: 684 - protein, 16 aa, synthetic construct
AISWLDGTFYANSVEG

SEQ ID NO: 685 - protein, 15 aa, synthetic construct
DRGPVRPVLAPDVDY

SEQ ID NO: 686 - protein, 5 aa, synthetic construct
DHTMA

SEQ ID NO: 687 - protein, 17 aa, synthetic construct
ARDWSDIITRYASSVKG

SEQ ID NO: 688 - protein, 17 aa, synthetic construct
REGGVVAGVRSGAPYDY

SEQ ID NO: 689 - protein, 5 aa, synthetic construct
DHTMA

SEQ ID NO: 690 - protein, 17 aa, synthetic construct
ARDWSDIITRYASSVKG

SEQ ID NO: 691 - protein, 17 aa, synthetic construct
REGGVVAGVRSGAPYDY

SEQ ID NO: 692 - protein, 5 aa, synthetic construct
DHTMA

SEQ ID NO: 693 - protein, 17 aa, synthetic construct
ARDWSDIITRYASSVKG

SEQ ID NO: 694 - protein, 17 aa, synthetic construct
REGGVVAGVRSGAPYDY

SEQ ID NO: 695 - protein, 5 aa, synthetic construct
DHTMA

SEQ ID NO: 696 - protein, 17 aa, synthetic construct
ARDWSDIITRYASSVKG

SEQ ID NO: 697 - protein, 17 aa, synthetic construct
REGGVVAGVRSGAPYDY

SEQ ID NO: 698 - protein, 5 aa, synthetic construct
DHTMA

SEQ ID NO: 699 - protein, 17 aa, synthetic construct
ARDWSDIITRYAGSVKG

SEQ ID NO: 700 - protein, 17 aa, synthetic construct
REGGVVAGVRSGAPYDY

SEQ ID NO: 701 - protein, 5 aa, synthetic construct
DHTMA

SEQ ID NO: 702 - protein, 17 aa, synthetic construct
ARDWSDIITRYASSVKG

SEQ ID NO: 703 - protein, 17 aa, synthetic construct
REGGVVAGVRSGAPYDY

SEQ ID NO: 704 - protein, 6 aa, synthetic construct
SSYGMA

SEQ ID NO: 705 - protein, 17 aa, synthetic construct
SISRYGTYTSYADSVKD

SEQ ID NO: 706 - protein, 20 aa, synthetic construct
YTYSGSFYSTVKTHRDEYQY

SEQ ID NO: 707 - protein, 6 aa, synthetic construct
SSYGMG

SEQ ID NO: 708 - protein, 17 aa, synthetic construct
AISRFGTYTSYADPVKD

SEQ ID NO: 709 - protein, 20 aa, synthetic construct
YTYSGSFYSTVKTHHDEYRY

SEQ ID NO: 710 - protein, 5 aa, synthetic construct
GYAIG

SEQ ID NO: 711 - protein, 17 aa, synthetic construct
YINGRDGSTFYADSVKG

SEQ ID NO: 712 - protein, 21 aa, synthetic construct
DRLGSRGAYVSSWWRSPDMDL

SEQ ID NO: 713 - protein, 5 aa, synthetic construct
TRNMG

SEQ ID NO: 714 - protein, 17 aa, synthetic construct
AVSWSVDNKLYAGSVKG

SEQ ID NO: 715 - protein, 18 aa, synthetic construct
DNIPLSSDMRPTATEFGY

SEQ ID NO: 716 - protein, 5 aa, synthetic construct
GYAIG

SEQ ID NO: 717 - protein, 17 aa, synthetic construct
YINGRDGSTFYADSVKG

SEQ ID NO: 718 - protein, 21 aa, synthetic construct
DRLGSRGAYVSTWWRPPDMDL

SEQ ID NO: 719 - protein, 5 aa, synthetic construct
GYAVG

SEQ ID NO: 720 - protein, 17 aa, synthetic construct
YITGSDGVTYYIDSVKG

SEQ ID NO: 721 - protein, 21 aa, synthetic construct
DRLGSQGRYASSWWRAGDMDF

SEQ ID NO: 722 - protein, 5 aa, synthetic construct
WHAMG

SEQ ID NO: 723 - protein, 17 aa, synthetic construct
TITWTGRDTYYADSVRG

SEQ ID NO: 724 - protein, 16 aa, synthetic construct
ARERATWAYSEDDCDY

SEQ ID NO: 725 - protein, 5 aa, synthetic construct
GYAIG

SEQ ID NO: 726 - protein, 17 aa, synthetic construct
YINGRDGSTFYTDSVKG

SEQ ID NO: 727 - protein, 21 aa, synthetic construct
DRLGSRGAYVSSWWRSPDMDL

SEQ ID NO: 728 - protein, 5 aa, synthetic construct
WHAMG

SEQ ID NO: 729 - protein, 17 aa, synthetic construct
TITWTGRDTYYADSVRG

SEQ ID NO: 730 - protein, 16 aa, synthetic construct
ARERATWAYSEDDCDY

SEQ ID NO: 731 - protein, 5 aa, synthetic construct
WHAMG

SEQ ID NO: 732 - protein, 17 aa, synthetic construct
TITWTGRDTYYADSVRG

SEQ ID NO: 733 - protein, 16 aa, synthetic construct
ARERATWAYSEDDCDY

SEQ ID NO: 734 - protein, 6 aa, synthetic construct
SSYGMA

SEQ ID NO: 735 - protein, 17 aa, synthetic construct
SISRYGTYTSYADSVKG

SEQ ID NO: 736 - protein, 20 aa, synthetic construct
YTYSGSFYSTVKTHRDEYQY

SEQ ID NO: 737 - protein, 5 aa, synthetic construct
GYAIG

SEQ ID NO: 738 - protein, 17 aa, synthetic construct
YINGRDGSTFYADSVKG

SEQ ID NO: 739 - protein, 21 aa, synthetic construct
DRLGSRGAYVSSWWRSPDMDL

SEQ ID NO: 740 - protein, 6 aa, synthetic construct
SSYGMG

SEQ ID NO: 741 - protein, 17 aa, synthetic construct
AISRFGTYTSYADPVKD

SEQ ID NO: 742 - protein, 20 aa, synthetic construct
YTYSGSFYSTVKTHHDEYRY

SEQ ID NO: 743 - protein, 5 aa, synthetic construct
GYAIG

SEQ ID NO: 744 - protein, 17 aa, synthetic construct
YITGSDGSRYYADSVKG

SEQ ID NO: 745 - protein, 21 aa, synthetic construct
DRLGSRGAYVSAWWRSSDMDL

SEQ ID NO: 746 - protein, 6 aa, synthetic construct
SSYGMG

SEQ ID NO: 747 - protein, 17 aa, synthetic construct
AISRYGTYTSYADPVKD

SEQ ID NO: 748 - protein, 20 aa, synthetic construct
YTYSGSFYSTVKTHHDEYHY

SEQ ID NO: 749 - protein, 5 aa, synthetic construct
GYAIG

SEQ ID NO: 750 - protein, 17 aa, synthetic construct
YITGSDASTYYIDSVKG

SEQ ID NO: 751 - protein, 21 aa, synthetic construct
DRLGSRGGYASSWWRSGDMDL

SEQ ID NO: 752 - protein, 5 aa, synthetic construct
GYAIG

SEQ ID NO: 753 - protein, 17 aa, synthetic construct
YINGRDGSTFYADSVKG

SEQ ID NO: 754 - protein, 21 aa, synthetic construct
DRLGSRGAYVSTWWRSPDMDL

SEQ ID NO: 755 - protein, 5 aa, synthetic construct
GYAIG

SEQ ID NO: 756 - protein, 17 aa, synthetic construct
YITGSDGSTYYADSVKG

SEQ ID NO: 757 - protein, 21 aa, synthetic construct
DRLGSRGAYVPIWWRSSDMDL

SEQ ID NO: 758 - protein, 5 aa, synthetic construct
GYAIG

SEQ ID NO: 759 - protein, 17 aa, synthetic construct
YITGSNGSTYYIDSVKG

SEQ ID NO: 760 - protein, 21 aa, synthetic construct
DRLGSRGLYASSWWRSGDMDL

SEQ ID NO: 761 - protein, 5 aa, synthetic construct
GYAIG

SEQ ID NO: 762 - protein, 17 aa, synthetic construct
YITGSDGSTYYIDSVKG

SEQ ID NO: 763 - protein, 21 aa, synthetic construct
DRLGSRGLYASSWWRSGDMDL

SEQ ID NO: 764 - protein, 5 aa, synthetic construct
GYAIG

SEQ ID NO: 765 - protein, 17 aa, synthetic construct
YITGSDGSTYYADSVKG

SEQ ID NO: 766 - protein, 21 aa, synthetic construct
DRLGSGGAYVPIWWRSSDMDL

SEQ ID NO: 767 - protein, 5 aa, synthetic construct
GYAIG

SEQ ID NO: 768 - protein, 17 aa, synthetic construct
YITGSDGSTYYRDSVKG

SEQ ID NO: 769 - protein, 21 aa, synthetic construct
DRLGSRGLYASSWWRSGDMDL

SEQ ID NO: 770 - protein, 5 aa, synthetic construct
GYAIG

SEQ ID NO: 771 - protein, 17 aa, synthetic construct
YITGSDGSTYYIDSVKG

SEQ ID NO: 772 - protein, 21 aa, synthetic construct
DRLGSRGLYASSWWRSGDMDL

SEQ ID NO: 773 - protein, 5 aa, synthetic construct
GYAIG

SEQ ID NO: 774 - protein, 17 aa, synthetic construct
YITGSDASTYYIDSVKG

SEQ ID NO: 775 - protein, 21 aa, synthetic construct
DRLGSRGGYASSWWRSGDMDL

SEQ ID NO: 776 - protein, 6 aa, synthetic construct
SSYGMG

SEQ ID NO: 777 - protein, 17 aa, synthetic construct
AISRYGTYTSYADPVKD

SEQ ID NO: 778 - protein, 20 aa, synthetic construct
YTYSGSFYSTVKTHHDEYHY

SEQ ID NO: 779 - protein, 6 aa, synthetic construct
SSYGMA

SEQ ID NO: 780 - protein, 17 aa, synthetic construct
SISRYGTYTSYADSVKD

SEQ ID NO: 781 - protein, 20 aa, synthetic construct
YTYSGSFYSTVKTHRDEYQY

SEQ ID NO: 782 - protein, 6 aa, synthetic construct
SSYGMA

SEQ ID NO: 783 - protein, 17 aa, synthetic construct
SISRYGTYTSYADSVKD

SEQ ID NO: 784 - protein, 20 aa, synthetic construct
YTYSGSFYSAVKTHRDEYQY

SEQ ID NO: 785 - protein, 5 aa, synthetic construct
WHAMG

SEQ ID NO: 786 - protein, 17 aa, synthetic construct
TITWTGRDTYYADSVRG

SEQ ID NO: 787 - protein, 16 aa, synthetic construct
ARERATWAYSEDDCDY

SEQ ID NO: 788 - protein, 6 aa, synthetic construct
SSYGMA

SEQ ID NO: 789 - protein, 17 aa, synthetic construct
SISRYGTYTSYADSVKD

SEQ ID NO: 790 - protein, 20 aa, synthetic construct
YTYSGSFYSTVKTHRDEYQY

SEQ ID NO: 791 - protein, 5 aa, synthetic construct
WHAMG

SEQ ID NO: 792 - protein, 17 aa, synthetic construct
TITWTGRDTYYADSVRG

SEQ ID NO: 793 - protein, 16 aa, synthetic construct
ARERATWAYSEDDCDY

SEQ ID NO: 794 - protein, 5 aa, synthetic construct
GYAIG

SEQ ID NO: 795 - protein, 17 aa, synthetic construct
YITGSDGSSYYADSVKG

SEQ ID NO: 796 - protein, 21 aa, synthetic construct
DHLGSRGGYHSSWWRSSDMDL

SEQ ID NO: 797 - skipped

SEQ ID NO: 798 - protein, 5 aa, synthetic construct
SDVMG

SEQ ID NO: 799 - protein, 16 aa, synthetic construct
DMADGGSAKYGDSVKG

SEQ ID NO: 800 - protein, 11 aa, synthetic construct
GLWITGRHSDY

SEQ ID NO: 801 - protein, 5 aa, synthetic construct
NDVMG

SEQ ID NO: 802 - protein, 16 aa, synthetic construct
DMDDTGSTKYADSVKG

SEQ ID NO: 803 - protein, 11 aa, synthetic construct
GLWIKGRHFDY

SEQ ID NO: 804 - protein, 5 aa, synthetic construct
NYAMS

SEQ ID NO: 805 - protein, 17 aa, synthetic construct
SITGAGRGTHYADSVKG

SEQ ID NO: 806 - protein, 17 aa, synthetic construct
YSSSTYYPPTPARGTDY

SEQ ID NO: 807 - protein, 5 aa, synthetic construct
NDVMG

SEQ ID NO: 808 - protein, 16 aa, synthetic construct
DMDDTGSTKYADSVKG

SEQ ID NO: 809 - protein, 11 aa, synthetic construct
GLWIKGRHSDY

SEQ ID NO: 810 - protein, 5 aa, synthetic construct
SITMA

SEQ ID NO: 811 - protein, 17 aa, synthetic construct
GINFSGTRTFYADSVKG

SEQ ID NO: 812 - protein, 15 aa, synthetic construct
SPRGFYGPGNALYDY

SEQ ID NO: 813 - protein, 5 aa, synthetic construct
SDVMG

SEQ ID NO: 814 - protein, 16 aa, synthetic construct
DMADGGSAKYADSVKG

SEQ ID NO: 815 - protein, 11 aa, synthetic construct
GLWIAGRHSDY

SEQ ID NO: 816 - protein, 5 aa, synthetic construct
SDVMG

SEQ ID NO: 817 - protein, 16 aa, synthetic construct
DMADGGSAKYADSVKG

SEQ ID NO: 818 - protein, 11 aa, synthetic construct
GLWIAGRHSDY

SEQ ID NO: 819 - protein, 5 aa, synthetic construct
NYAMS

SEQ ID NO: 820 - protein, 17 aa, synthetic construct
SITGAGRGTHYADSVKG

SEQ ID NO: 821 - protein, 17 aa, synthetic construct
YSSSTYYPPTPARGTDY

SEQ ID NO: 822 - protein, 5 aa, synthetic construct
NYAMT

SEQ ID NO: 823 - protein, 17 aa, synthetic construct
SITGAGRGTHYADSVKG

SEQ ID NO: 824 - protein, 17 aa, synthetic construct
YSSSTYYPTTPVRGTDY

SEQ ID NO: 825 - protein, 5 aa, synthetic construct
SDVMG

SEQ ID NO: 826 - protein, 16 aa, synthetic construct
DMADGGSAKYGDSVKG

SEQ ID NO: 827 - protein, 11 aa, synthetic construct
GLWIKGRHSDY

SEQ ID NO: 828 - protein, 5 aa, synthetic construct
SDFMG

SEQ ID NO: 829 - protein, 16 aa, synthetic construct
DMADGGSARYGDSVKG

SEQ ID NO: 830 - protein, 11 aa, synthetic construct
GLWIAGRHFDY

SEQ ID NO: 831 - protein, 5 aa, synthetic construct
SITMA

SEQ ID NO: 832 - protein, 17 aa, synthetic construct
GINFSGSRTAYGDSVKG

SEQ ID NO: 833 - protein, 15 aa, synthetic construct
SPRGFYGPGHALYDY

SEQ ID NO: 834 - protein, 5 aa, synthetic construct
NDVMG

SEQ ID NO: 835 - protein, 16 aa, synthetic construct
DMDDTGSTKYADSVKG

SEQ ID NO: 836 - protein, 11 aa, synthetic construct
GLWIKGRHSDY

SEQ ID NO: 837 - protein, 5 aa, synthetic construct
RYTMA

SEQ ID NO: 838 - protein, 17 aa, synthetic construct
SVTDSGRTTDYVASVQG

SEQ ID NO: 839 - protein, 14 aa, synthetic construct
NTDYFQIRSLDRNT

SEQ ID NO: 840 - protein, 5 aa, synthetic construct
SDVMG

SEQ ID NO: 841 - protein, 16 aa, synthetic construct
DMADGGSVKYGDSVKG

SEQ ID NO: 842 - protein, 11 aa, synthetic construct
GLWITGRHFDY

SEQ ID NO: 843 - protein, 5 aa, synthetic construct
NYAMS

SEQ ID NO: 844 - protein, 17 aa, synthetic construct
SITGAGRGTYYAESVKG

SEQ ID NO: 845 - protein, 17 aa, synthetic construct
YDSSTFYPPTPARGIAD

SEQ ID NO: 846 - protein, 5 aa, synthetic construct
SDFMG

SEQ ID NO: 847 - protein, 16 aa, synthetic construct
DMADGGSARYGDSVKG

SEQ ID NO: 848 - protein, 11 aa, synthetic construct
GLWIAGRHFDY

SEQ ID NO: 849 - protein, 5 aa, synthetic construct
SYAMG

SEQ ID NO: 850 - protein, 17 aa, synthetic construct
ATTRGGGRTMYAVSTEG

SEQ ID NO: 851 - protein, 18 aa, synthetic construct
MTSYYSGTYYPDSSDFDI

SEQ ID NO: 852 - protein, 5 aa, synthetic construct
SDVMG

SEQ ID NO: 853 - protein, 16 aa, synthetic construct
DMADGGSVKYGDSVKG

SEQ ID NO: 854 - protein, 11 aa, synthetic construct
GLWITGRHFDY

SEQ ID NO: 855 - protein, 5 aa, synthetic construct
SYAMG

SEQ ID NO: 856 - protein, 17 aa, synthetic construct
ATTRGGGRTMYAVSTEG

SEQ ID NO: 857 - protein, 18 aa, synthetic construct
MTSYYSGTYYPDSSDFDI

SEQ ID NO: 858 - protein, 5 aa, synthetic construct
NYAMS

SEQ ID NO: 859 - protein, 17 aa, synthetic construct
SITGFGRGTDYADSVKG

SEQ ID NO: 860 - protein, 17 aa, synthetic construct
YSSSTYYPPTPARGRDY

SEQ ID NO: 861 - protein, 5 aa, synthetic construct
NDVMG

SEQ ID NO: 862 - protein, 16 aa, synthetic construct
DMDDTGSTKYADSVNG

SEQ ID NO: 863 - protein, 11 aa, synthetic construct
GLWIKGRHSDY

SEQ ID NO: 864 - protein, 5 aa, synthetic construct
SYAMG

SEQ ID NO: 865 - protein, 17 aa, synthetic construct
ATTRGGGRTMYAVSTEG

SEQ ID NO: 866 - protein, 18 aa, synthetic construct
MTSYYSGTYYPDSSDFDI

SEQ ID NO: 867 - protein, 5 aa, synthetic construct
NYAMS

SEQ ID NO: 868 - protein, 17 aa, synthetic construct
SITGFGRGTDYADSVKG

SEQ ID NO: 869 - protein, 17 aa, synthetic construct
YSSSTYYPPTPARGRDY

SEQ ID NO: 870 - protein, 5 aa, synthetic construct
SDVMG

SEQ ID NO: 871 - protein, 16 aa, synthetic construct
DMADGGSAKYADSVKG

SEQ ID NO: 872 - protein, 11 aa, synthetic construct
GLWIAGRHSDY

SEQ ID NO: 873 - protein, 5 aa, synthetic construct
SYAMG

SEQ ID NO: 874 - protein, 17 aa, synthetic construct
ATTRGGGRTMYAVSTEG

SEQ ID NO: 875 - protein, 18 aa, synthetic construct
MTSYYSGTYYPDSSDFDI

SEQ ID NO: 876 - protein, 5 aa, synthetic construct
NDVMG

SEQ ID NO: 877 - protein, 16 aa, synthetic construct
DMDDTGSTKYADSVKG

SEQ ID NO: 878 - protein, 11 aa, synthetic construct
GLWIKGRHFDY

SEQ ID NO: 879 - protein, 5 aa, synthetic construct
NDVMG

SEQ ID NO: 880 - protein, 16 aa, synthetic construct
DMDDTGSTKYADSVKG

SEQ ID NO: 881 - protein, 11 aa, synthetic construct
GLWIKGRHFDY

SEQ ID NO: 882 - protein, 5 aa, synthetic construct
SYALG

SEQ ID NO: 883 - protein, 17 aa, synthetic construct
ATTRGGGRTMYAVSTEG

SEQ ID NO: 884 - protein, 18 aa, synthetic construct
MTSYYSGTYYPDSSDFDI

SEQ ID NO: 885 - protein, 5 aa, synthetic construct
NDVMG

SEQ ID NO: 886 - protein, 16 aa, synthetic construct
DMDDTGSTKYADSVKG

SEQ ID NO: 887 - protein, 11 aa, synthetic construct
GLWIKGRHSDY

SEQ ID NO: 888 - protein, 5 aa, synthetic construct
NDVMG

SEQ ID NO: 889 - protein, 16 aa, synthetic construct
DMDDTGSTKYADSVKG

SEQ ID NO: 890 - protein, 11 aa, synthetic construct
GLWIKGRHFDY

SEQ ID NO: 891 - protein, 5 aa, synthetic construct
SDVMG

SEQ ID NO: 892 - protein, 16 aa, synthetic construct
DMADGGSAKYADSVKG

SEQ ID NO: 893 - protein, 11 aa, synthetic construct
GLWIAGRHSDY

SEQ ID NO: 894 - protein, 5 aa, synthetic construct
NYAMS

SEQ ID NO: 895 - protein, 17 aa, synthetic construct
SITGAGRGTDYADSVKG

SEQ ID NO: 896 - protein, 17 aa, synthetic construct
YSSGTYYPPTPVRGTDY

SEQ ID NO: 897 - protein, 5 aa, synthetic construct
SITMA

SEQ ID NO: 898 - protein, 15 aa, synthetic construct
NFSGTRTFYADSVKG

SEQ ID NO: 899 - protein, 15 aa, synthetic construct
SPRGFYGPGNALYDY

SEQ ID NO: 900 - protein, 5 aa, synthetic construct
SDVMG

SEQ ID NO: 901 - protein, 16 aa, synthetic construct
DMADGGSAKYADSVKG

SEQ ID NO: 902 - protein, 11 aa, synthetic construct
GLWIAGRHSDY

SEQ ID NO: 903 - protein, 5 aa, synthetic construct
NDVTG

SEQ ID NO: 904 - protein, 16 aa, synthetic construct
DMDDTGSTKYADSVKG

SEQ ID NO: 905 - protein, 11 aa, synthetic construct
GLWIKGRHSDY

SEQ ID NO: 906 - protein, 5 aa, synthetic construct
SDVMG

SEQ ID NO: 907 - protein, 16 aa, synthetic construct
DMADGGSAKYGDSVKG

SEQ ID NO: 908 - protein, 11 aa, synthetic construct
GLWITGRHSDY

SEQ ID NO: 909 - protein, 5 aa, synthetic construct
SYAMG

SEQ ID NO: 910 - protein, 17 aa, synthetic construct
ATTRGGGRTMYAVSTEG

SEQ ID NO: 911 - protein, 18 aa, synthetic construct
MTSYYSGTYYPDSSDFDI

SEQ ID NO: 912 - protein, 5 aa, synthetic construct
NYAMS

SEQ ID NO: 913 - protein, 17 aa, synthetic construct
SITGAGRGTDYADSVKG

SEQ ID NO: 914 - protein, 17 aa, synthetic construct
YSSGTYYPPTPVRGTDY

SEQ ID NO: 915 - protein, 5 aa, synthetic construct
NYAMS

SEQ ID NO: 916 - protein, 17 aa, synthetic construct
SITGFGRGTDYADSVKG

SEQ ID NO: 917 - protein, 17 aa, synthetic construct
YSSSTYYPPTPARGRDY

SEQ ID NO: 918 - protein, 5 aa, synthetic construct
NDVMG

SEQ ID NO: 919 - protein, 16 aa, synthetic construct
DMDDTGSTKYADSVKG

SEQ ID NO: 920 - protein, 11 aa, synthetic construct
GLWIKGRHSDY

SEQ ID NO: 921 - protein, 5 aa, synthetic construct
SDFMG

SEQ ID NO: 922 - protein, 16 aa, synthetic construct
DMADGGSARYGDSVKG

SEQ ID NO: 923 - protein, 11 aa, synthetic construct
GLWIAGRHFDY

SEQ ID NO: 924 - protein, 5 aa, synthetic construct
RYTMA

SEQ ID NO: 925 - protein, 17 aa, synthetic construct
TVTDSGRTTEYVDSVKG

SEQ ID NO: 926 - protein, 14 aa, synthetic construct
NTDYFRIRSLDANT

SEQ ID NO: 927 - protein, 5 aa, synthetic construct
NFPMG

SEQ ID NO: 928 - protein, 17 aa, synthetic construct
AITWISGSTLYADSVKG

SEQ ID NO: 929 - protein, 14 aa, synthetic construct
ALKTITRGQHDYTY

SEQ ID NO: 930 - protein, 5 aa, synthetic construct
INTMG

SEQ ID NO: 931 - protein, 17 aa, synthetic construct
AISRSGDSTVYVDSVKG

SEQ ID NO: 932 - protein, 17 aa, synthetic construct
TVAVGWTTRWSTIDFDS

SEQ ID NO: 933 - protein, 5 aa, synthetic construct
TTEMG

SEQ ID NO: 934 - protein, 16 aa, synthetic construct
AITWSGRGTMYAESVE

SEQ ID NO: 935 - protein, 16 aa, synthetic construct
ARRGRAAVRSEGGYDF

SEQ ID NO: 936 - protein, 5 aa, synthetic construct
RYTMA

SEQ ID NO: 937 - protein, 17 aa, synthetic construct
SVTDSGRTTDYVASVQG

SEQ ID NO: 938 - protein, 14 aa, synthetic construct
NTDYFQIRSLDRNT

SEQ ID NO: 939 - protein, 5 aa, synthetic construct
RYTMA

SEQ ID NO: 940 - protein, 17 aa, synthetic construct
SVTDSGRTTDYVDSVKG

SEQ ID NO: 941 - protein, 14 aa, synthetic construct
NTDYFQIRSLDANT

SEQ ID NO: 942 - protein, 5 aa, synthetic construct
RYTMA

SEQ ID NO: 943 - protein, 17 aa, synthetic construct
SVTDSGRTTEYVDSVKG

SEQ ID NO: 944 - protein, 14 aa, synthetic construct
NTDYFQIRSLDLNT

SEQ ID NO: 945 - protein, 5 aa, synthetic construct
RYTMA

SEQ ID NO: 946 - protein, 17 aa, synthetic construct
TVTDSGRTTEYVDSVKG

SEQ ID NO: 947 - protein, 14 aa, synthetic construct
NTDYFRIRSLDANT

SEQ ID NO: 948 - protein, 5 aa, synthetic construct
RQPMY

SEQ ID NO: 949 - protein, 17 aa, synthetic construct
AITWSGRGTLYADSVEG

SEQ ID NO: 950 - protein, 15 aa, synthetic construct
GPYGDAAYRHGRIDS

SEQ ID NO: 951 - protein, 5 aa, synthetic construct
RYTMA

SEQ ID NO: 952 - protein, 17 aa, synthetic construct
SITDSGRTTEYVDSVKG

SEQ ID NO: 953 - protein, 14 aa, synthetic construct
NTDYFRIRSLDANT

SEQ ID NO: 954 - protein, 5 aa, synthetic construct
RYTMA

SEQ ID NO: 955 - protein, 17 aa, synthetic construct
VVTDSGRTTEYVDSVKG

SEQ ID NO: 956 - protein, 14 aa, synthetic construct
NTDYFQIRSVDNNA

SEQ ID NO: 957 - protein, 5 aa, synthetic construct
LNTMG

SEQ ID NO: 958 - protein, 17 aa, synthetic construct
AISRSGGSATYGDSVKG

SEQ ID NO: 959 - protein, 17 aa, synthetic construct
SAAVGWTTRWSTIDFDS

SEQ ID NO: 960 - protein, 5 aa, synthetic construct
RYTMA

SEQ ID NO: 961 - protein, 17 aa, synthetic construct
SVTDSGRTTEYVHSVRG

SEQ ID NO: 962 - protein, 14 aa, synthetic construct
NTDYFRIRSLDANT

SEQ ID NO: 963 - protein, 5 aa, synthetic construct
NYAMG

SEQ ID NO: 964 - protein, 15 aa, synthetic construct
THLTSTTHYADSVKG

SEQ ID NO: 965 - protein, 12 aa, synthetic construct
DRNIKITADWSY

SEQ ID NO: 966 - protein, 5 aa, synthetic construct
RYTMA

SEQ ID NO: 967 - protein, 17 aa, synthetic construct
SVTDSGRTTEYVDSAKG

SEQ ID NO: 968 - protein, 14 aa, synthetic construct
NTDYFQIRSLRANT

SEQ ID NO: 969 - protein, 5 aa, synthetic construct
TTEMG

SEQ ID NO: 970 - protein, 17 aa, synthetic construct
AITWTGRGTMYAESVEG

SEQ ID NO: 971 - protein, 16 aa, synthetic construct
ARRGRAAVRSEGGYDF

SEQ ID NO: 972 - protein, 5 aa, synthetic construct
RYTMA

SEQ ID NO: 973 - protein, 17 aa, synthetic construct
SVTDSGRTTDYVASVQG

SEQ ID NO: 974 - protein, 14 aa, synthetic construct
NTDYFQIRSLDRNT

SEQ ID NO: 975 - protein, 5 aa, synthetic construct
RYTMA

SEQ ID NO: 976 - protein, 17 aa, synthetic construct
SVTDSGRTTDYVDSVKG

SEQ ID NO: 977 - protein, 14 aa, synthetic construct
NTDYFQIRSLEFNT

SEQ ID NO: 978 - protein, 5 aa, synthetic construct
RYTMA

SEQ ID NO: 979 - protein, 17 aa, synthetic construct
LVTDSGRTTEYVDSVKG

SEQ ID NO: 980 - protein, 14 aa, synthetic construct
NTDYFRIRSLDANT

SEQ ID NO: 981 - protein, 5 aa, synthetic construct
NYPVG

SEQ ID NO: 982 - protein, 17 aa, synthetic construct
AITWISGSTLYADSVKG

SEQ ID NO: 983 - protein, 14 aa, synthetic construct
ALKTITRGQNDYSY

SEQ ID NO: 984 - protein, 5 aa, synthetic construct
INAMG

SEQ ID NO: 985 - protein, 17 aa, synthetic construct
AISRNGGSTVYVDSVKG

SEQ ID NO: 986 - protein, 17 aa, synthetic construct
TDAVGWTTRWMTADFGF

SEQ ID NO: 987 - protein, 5 aa, synthetic construct
NFPMG

SEQ ID NO: 988 - protein, 17 aa, synthetic construct
AITWISGSTLYADSVKG

SEQ ID NO: 989 - protein, 14 aa, synthetic construct
ALKTITRGQHDYTY

SEQ ID NO: 990 - protein, 5 aa, synthetic construct
RYTMA

SEQ ID NO: 991 - protein, 17 aa, synthetic construct
SVTDSGRTTDYVASVQG

SEQ ID NO: 992 - protein, 14 aa, synthetic construct
NTDYFQIRSLDRNT

SEQ ID NO: 993 - protein, 5 aa, synthetic construct
SDAKA

SEQ ID NO: 994 - protein, 17 aa, synthetic construct
AITWAGRGTDYADSVKD

SEQ ID NO: 995 - protein, 18 aa, synthetic construct
NPTGVIGPGFRNSNRYDY

SEQ ID NO: 996 - protein, 5 aa, synthetic construct
NYPVG

SEQ ID NO: 997 - protein, 17 aa, synthetic construct
AITWISGSTLYADSVKG

SEQ ID NO: 998 - protein, 14 aa, synthetic construct
ALKTITRGQNDYSY

SEQ ID NO: 999 - protein, 5 aa, synthetic construct
RYTMA

SEQ ID NO: 1000 - protein, 17 aa, synthetic construct
VVTDSGRTTEYVDSVKG

SEQ ID NO: 1001 - protein, 14 aa, synthetic construct
NTDYFQIRSVDNNA

SEQ ID NO: 1002 - protein, 5 aa, synthetic construct
TTEMG

SEQ ID NO: 1003 - protein, 17 aa, synthetic construct
AITWTGRGTMYAESVEG

SEQ ID NO: 1004 - protein, 16 aa, synthetic construct
ARRGRAAVRSEGGYDF

SEQ ID NO: 1005 - protein, 5 aa, synthetic construct
RYTMA

SEQ ID NO: 1006 - protein, 17 aa, synthetic construct
SVTDSGRTTDYVDSVKG

SEQ ID NO: 1007 - protein, 14 aa, synthetic construct
NTDYFQIKSLDRNT

SEQ ID NO: 1008 - protein, 5 aa, synthetic construct
TTEMG

SEQ ID NO: 1009 - protein, 17 aa, synthetic construct
AITWTGRGTMYAESVEG

SEQ ID NO: 1010 - protein, 16 aa, synthetic construct
ARRGRAAVRSEGGYDF

SEQ ID NO: 1011 - protein, 5 aa, synthetic construct
RYTMA

SEQ ID NO: 1012 - protein, 17 aa, synthetic construct
SVTDSGRTTEYVDSVKG

SEQ ID NO: 1013 - protein, 14 aa, synthetic construct
NTDYFQIRSLRANT

SEQ ID NO: 1014 - protein, 5 aa, synthetic construct
NYAMG

SEQ ID NO: 1015 - protein, 15 aa, synthetic construct
THLTSTTHYADSVKG

SEQ ID NO: 1016 - protein, 12 aa, synthetic construct
DRNIKITADWSY

SEQ ID NO: 1017 - protein, 5 aa, synthetic construct
NYVMA

SEQ ID NO: 1018 - protein, 17 aa, synthetic construct
AITQTGRGTFYADSVEG

SEQ ID NO: 1019 - protein, 16 aa, synthetic construct
PRSGRAGTRNQMDYEY

SEQ ID NO: 1020 - protein, 5 aa, synthetic construct
SYAMG

SEQ ID NO: 1021 - protein, 17 aa, synthetic construct
AITWTKRSTDFPDSVKG

SEQ ID NO: 1022 - protein, 14 aa, synthetic construct
ARGLPVTPLGDIIY

SEQ ID NO: 1023 - protein, 5 aa, synthetic construct
SYAMG

SEQ ID NO: 1024 - protein, 17 aa, synthetic construct
AITWTKRSTDFPDSVKG

SEQ ID NO: 1025 - protein, 14 aa, synthetic construct
ARGLPVTPLGDIIY

SEQ ID NO: 1026 - protein, 5 aa, synthetic construct
TTEMG

SEQ ID NO: 1027 - protein, 17 aa, synthetic construct
AITWTGRGTMYAESVEG

SEQ ID NO: 1028 - protein, 16 aa, synthetic construct
ARRGRAAVRSEGGYDF

SEQ ID NO: 1029 - protein, 5 aa, synthetic construct
NYVMG

SEQ ID NO: 1030 - protein, 17 aa, synthetic construct
GITQFTSTTYYDDSVKG

SEQ ID NO: 1031 - protein, 12 aa, synthetic construct
DRSIKMTADWAY

SEQ ID NO: 1032 - protein, 5 aa, synthetic construct
NAIMA

SEQ ID NO: 1033 - protein, 17 aa, synthetic construct
AVTYSGMPTYQDDSVQG

SEQ ID NO: 1034 - protein, 14 aa, synthetic construct
RMYSASTYYGDYDY

SEQ ID NO: 1035 - protein, 5 aa, synthetic construct
DYTMG

SEQ ID NO: 1036 - protein, 17 aa, synthetic construct
AITGTGHTTDMPDSVEG

SEQ ID NO: 1037 - protein, 14 aa, synthetic construct
ARGLPVTPLGDIIY

SEQ ID NO: 1038 - protein, 5 aa, synthetic construct
SDAKA

SEQ ID NO: 1039 - protein, 17 aa, synthetic construct
AITWAGRGTDYADSVKG

SEQ ID NO: 1040 - protein, 18 aa, synthetic construct
NPRGVIGPAFRNSNHYTY

SEQ ID NO: 1041 - protein, 5 aa, synthetic construct
NYVIA

SEQ ID NO: 1042 - protein, 17 aa, synthetic construct
AITQTGRGTFYASSVEG

SEQ ID NO: 1043 - protein, 16 aa, synthetic construct
PRSGRAGTRNQMDYEY

SEQ ID NO: 1044 - protein, 5 aa, synthetic construct
INAMG

SEQ ID NO: 1045 - protein, 17 aa, synthetic construct
AISRNGGSTVYVDSVKG

SEQ ID NO: 1046 - protein, 17 aa, synthetic construct
TDAVGWTTRWMTADFGF

SEQ ID NO: 1047 - protein, 5 aa, synthetic construct
NYAMS

SEQ ID NO: 1048 - protein, 17 aa, synthetic construct
SITGFGRGTDYADSVKG

SEQ ID NO: 1049 - protein, 17 aa, synthetic construct
YSSSTYYPPTPARGTDY

SEQ ID NO: 1050 - protein, 5 aa, synthetic construct
NYAMS

SEQ ID NO: 1051 - protein, 17 aa, synthetic construct
SITGAGRGTHYADSVKG

SEQ ID NO: 1052 - protein, 17 aa, synthetic construct
YSSSTYYPPTPARGTDY

SEQ ID NO: 1053 - protein, 5 aa, synthetic construct
SYAMG

SEQ ID NO: 1054 - protein, 17 aa, synthetic construct
ATTRGGGRTMYAVSTEG

SEQ ID NO: 1055 - protein, 18 aa, synthetic construct
MTSYYSGTYYPDSSDFDI

SEQ ID NO: 1056 - protein, 5 aa, synthetic construct
DRNMG

SEQ ID NO: 1057 - protein, 17 aa, synthetic construct
IITWSSGSTVYADSVKG

SEQ ID NO: 1058 - protein, 14 aa, synthetic construct
DYYPYSGSWNIMDY

SEQ ID NO: 1059 - protein, 5 aa, synthetic construct
SYAMG

SEQ ID NO: 1060 - protein, 17 aa, synthetic construct
ATTRGGGRTMYAVSTEG

SEQ ID NO: 1061 - protein, 18 aa, synthetic construct
RTSYYSGTYYPASSDFDI

SEQ ID NO: 1062 - protein, 5 aa, synthetic construct
SDVMG

SEQ ID NO: 1063 - protein, 16 aa, synthetic construct
DMADGGSAKYADSVKG

SEQ ID NO: 1064 - protein, 11 aa, synthetic construct
GLWITGRHSDY

SEQ ID NO: 1065 - protein, 5 aa, synthetic construct
SYAMG

SEQ ID NO: 1066 - protein, 17 aa, synthetic construct
ATTRGGGRTMYAVSTEG

SEQ ID NO: 1067 - protein, 18 aa, synthetic construct
MTSYYSGTYYPDSSDFDI

SEQ ID NO: 1068 - protein, 5 aa, synthetic construct
SANMG

SEQ ID NO: 1069 - protein, 17 aa, synthetic construct
VITWSTGSTVYADSVKG

SEQ ID NO: 1070 - protein, 14 aa, synthetic construct
DVYPYSGNLNIMDY

SEQ ID NO: 1071 - protein, 5 aa, synthetic construct
SANMG

SEQ ID NO: 1072 - protein, 17 aa, synthetic construct
VITWSTGSTVYADSVKG

SEQ ID NO: 1073 - protein, 14 aa, synthetic construct
DVYPYSGNLNIMDY

SEQ ID NO: 1074 - protein, 5 aa, synthetic construct
SDVMG

SEQ ID NO: 1075 - protein, 16 aa, synthetic construct
DMADGGSAKYADSVKG

SEQ ID NO: 1076 - protein, 11 aa, synthetic construct
GLWLAGRHSDY

SEQ ID NO: 1077 - protein, 5 aa, synthetic construct
SITMA

SEQ ID NO: 1078 - protein, 17 aa, synthetic construct
GINFSGSRTAYGDSVKG

SEQ ID NO: 1079 - protein, 15 aa, synthetic construct
SPRGFYGPGHALYDY

SEQ ID NO: 1080 - protein, 5 aa, synthetic construct
NYAMS

SEQ ID NO: 1081 - protein, 17 aa, synthetic construct
SITGAGRGTYYADSVKG

SEQ ID NO: 1082 - protein, 17 aa, synthetic construct
YDSSTYYPPTPARGIAD

SEQ ID NO: 1083 - protein, 5 aa, synthetic construct
SYGIG

SEQ ID NO: 1084 - protein, 17 aa, synthetic construct
CMSRSDDRTFYADSVKG

SEQ ID NO: 1085 - protein, 16 aa, synthetic construct
VDAYGCSLVQPTTYDF

SEQ ID NO: 1086 - protein, 5 aa, synthetic construct
SDVMG

SEQ ID NO: 1087 - protein, 16 aa, synthetic construct
DMADGGSVKYGDSVKG

SEQ ID NO: 1088 - protein, 11 aa, synthetic construct
GLWITGRHFDY

SEQ ID NO: 1089 - protein, 5 aa, synthetic construct
SDVMG

SEQ ID NO: 1090 - protein, 16 aa, synthetic construct
DMADGGSAKYADSVKG

SEQ ID NO: 1091 - protein, 11 aa, synthetic construct
GLWIAGRHSDY

SEQ ID NO: 1092 - protein, 5 aa, synthetic construct
SANMG

SEQ ID NO: 1093 - protein, 17 aa, synthetic construct
VITWSTGSTVYADSVKG

SEQ ID NO: 1094 - protein, 14 aa, synthetic construct
DVYPYSGNLNIMDY

SEQ ID NO: 1095 - protein, 5 aa, synthetic construct
DYGIG

SEQ ID NO: 1096 - protein, 17 aa, synthetic construct
CMSRSDDKTYYADYVKG

SEQ ID NO: 1097 - protein, 16 aa, synthetic construct
VDAYGCSLVQPTTYDY

SEQ ID NO: 1098 - protein, 5 aa, synthetic construct
SDVMG

SEQ ID NO: 1099 - protein, 16 aa, synthetic construct
DMADGGSAKYGDSVKG

SEQ ID NO: 1100 - protein, 11 aa, synthetic construct
GLWIKGRHSDY

SEQ ID NO: 1101 - protein, 5 aa, synthetic construct
NYAMS

SEQ ID NO: 1102 - protein, 17 aa, synthetic construct
SITGAGRGTHYADSVKG

SEQ ID NO: 1103 - protein, 17 aa, synthetic construct
YSSSTYYPPTPARGTDY

SEQ ID NO: 1104 - protein, 5 aa, synthetic construct
SDVMG

SEQ ID NO: 1105 - protein, 16 aa, synthetic construct
DMADGGSVKYGDSVKG

SEQ ID NO: 1106 - protein, 11 aa, synthetic construct
GLWITGRHFDY

SEQ ID NO: 1107 - protein, 5 aa, synthetic construct
NDVMG

SEQ ID NO: 1108 - protein, 16 aa, synthetic construct
DMDDTGSTKYADSVKG

SEQ ID NO: 1109 - protein, 11 aa, synthetic construct
GLWIKGRHSDY

SEQ ID NO: 1110 - protein, 5 aa, synthetic construct
SYAMG

SEQ ID NO: 1111 - protein, 17 aa, synthetic construct
ATTRGGGRTMYAVSTEG

SEQ ID NO: 1112 - protein, 18 aa, synthetic construct
RTSYYDGTYYPASSDFDI

SEQ ID NO: 1113 - protein, 5 aa, synthetic construct
NYAMS

SEQ ID NO: 1114 - protein, 18 aa, synthetic construct
SSITSAGRGTHYADTVKG

SEQ ID NO: 1115 - protein, 17 aa, synthetic construct
YSSATYYPPTPAQGRDY

SEQ ID NO: 1116 - protein, 5 aa, synthetic construct
SDVMG

SEQ ID NO: 1117 - protein, 16 aa, synthetic construct
DMADGNSAKYADSVKG

SEQ ID NO: 1118 - protein, 11 aa, synthetic construct
GLWIAGRHSDY

SEQ ID NO: 1119 - protein, 5 aa, synthetic construct
NDVMG

SEQ ID NO: 1120 - protein, 16 aa, synthetic construct
DMDDTGSTKYADSVKG

SEQ ID NO: 1121 - protein, 11 aa, synthetic construct
GLWIKGRHSDY

SEQ ID NO: 1122 - protein, 5 aa, synthetic construct
SYAMG

SEQ ID NO: 1123 - protein, 17 aa, synthetic construct
ATTRGGGRTMYAVSTEG

SEQ ID NO: 1124 - protein, 18 aa, synthetic construct
RTSYYDGTYYPASSDFDI

SEQ ID NO: 1125 - protein, 5 aa, synthetic construct
RYTMA

SEQ ID NO: 1126 - protein, 17 aa, synthetic construct
SVTDSGRTTDYVASVQG

SEQ ID NO: 1127 - protein, 14 aa, synthetic construct
NTDYFQIRSLDRNT

SEQ ID NO: 1128 - protein, 5 aa, synthetic construct
SDVVG

SEQ ID NO: 1129 - protein, 16 aa, synthetic construct
TINLDDTKHYGEVVKG

SEQ ID NO: 1130 - protein, 7 aa, synthetic construct
RRGSEFY

SEQ ID NO: 1131 - protein, 5 aa, synthetic construct
SITMA

SEQ ID NO: 1132 - protein, 17 aa, synthetic construct
GINFSGTRTFYADSVKG

SEQ ID NO: 1133 - protein, 15 aa, synthetic construct
SPRGFYGPGNALYDY

SEQ ID NO: 1134 - protein, 5 aa, synthetic construct
SYAMG

SEQ ID NO: 1135 - protein, 17 aa, synthetic construct
ATTRGGGRTMYAVSTEG

SEQ ID NO: 1136 - protein, 18 aa, synthetic construct
RTSYYDGTYYPASSDFDI

SEQ ID NO: 1137 - protein, 5 aa, synthetic construct
SDVMG

SEQ ID NO: 1138 - protein, 16 aa, synthetic construct
DMADGGSAKYADSVKG

SEQ ID NO: 1139 - protein, 11 aa, synthetic construct
GLWIAGRHSDY

SEQ ID NO: 1140 - protein, 5 aa, synthetic construct
RYTMA

SEQ ID NO: 1141 - protein, 17 aa, synthetic construct
SVTDSGRTTDYVASVQG

SEQ ID NO: 1142 - protein, 14 aa, synthetic construct
NTDYFQIRSLDRNT

SEQ ID NO: 1143 - protein, 5 aa, synthetic construct
NYAMS

SEQ ID NO: 1144 - protein, 17 aa, synthetic construct
SITGAGRGTHYADSVKG

SEQ ID NO: 1145 - protein, 17 aa, synthetic construct
YSSSTYYPPTPARGTDY

SEQ ID NO: 1146 - protein, 5 aa, synthetic construct
NDVMG

SEQ ID NO: 1147 - protein, 16 aa, synthetic construct
DMDDTGSTKYADSVKG

SEQ ID NO: 1148 - protein, 11 aa, synthetic construct
GLWIKGRHSDY

SEQ ID NO: 1149 - protein, 5 aa, synthetic construct
NFPMG

SEQ ID NO: 1150 - protein, 17 aa, synthetic construct
AITWISGSTLYADSVKG

SEQ ID NO: 1151 - protein, 14 aa, synthetic construct
ALKTITRGQHDYTY

SEQ ID NO: 1152 - protein, 5 aa, synthetic construct
TDCMG

SEQ ID NO: 1153 - protein, 17 aa, synthetic construct
GITWGTGSTLYADSVEG

SEQ ID NO: 1154 - protein, 12 aa, synthetic construct
DRYCYRGTVYRD

SEQ ID NO: 1155 - protein, 5 aa, synthetic construct
RYTMA

SEQ ID NO: 1156 - protein, 17 aa, synthetic construct
SVTDSGRTTDYGDSVKG

SEQ ID NO: 1157 - protein, 14 aa, synthetic construct
NTDYFQIRSLDANT

SEQ ID NO: 1158 - protein, 5 aa, synthetic construct
RYTMA

SEQ ID NO: 1159 - protein, 17 aa, synthetic construct
TVTDSGRTTEYVDSVKG

SEQ ID NO: 1160 - protein, 14 aa, synthetic construct
NTDYFRIRSLDANT

SEQ ID NO: 1161 - protein, 5 aa, synthetic construct
SYVMG

SEQ ID NO: 1162 - protein, 17 aa, synthetic construct
AITGTRRTTDWPDSVKG

SEQ ID NO: 1163 - protein, 14 aa, synthetic construct
ARGLPVPPLGDIIH

SEQ ID NO: 1164 - protein, 5 aa, synthetic construct
SDAKG

SEQ ID NO: 1165 - protein, 17 aa, synthetic construct
AITWAGRGTDYADSVKG

SEQ ID NO: 1166 - protein, 18 aa, synthetic construct
NPEGVIGPYFRNSNRYNY

SEQ ID NO: 1167 - protein, 5 aa, synthetic construct
RYTMA

SEQ ID NO: 1168 - protein, 17 aa, synthetic construct
AVTDSGRTTEYVDSVKG

SEQ ID NO: 1169 - protein, 14 aa, synthetic construct
NTDYFQIRSVDNNA

SEQ ID NO: 1170 - protein, 5 aa, synthetic construct
RYTMA

SEQ ID NO: 1171 - protein, 17 aa, synthetic construct
SVTDSGRTTDYVASVQG

SEQ ID NO: 1172 - protein, 14 aa, synthetic construct
NTDYFQIRSLDRNT

SEQ ID NO: 1173 - protein, 5 aa, synthetic construct
RYTMA

SEQ ID NO: 1174 - protein, 17 aa, synthetic construct
SVTDSGRTTDYVASVQG

SEQ ID NO: 1175 - protein, 14 aa, synthetic construct
NTDYFQIRSLDRNT

SEQ ID NO: 1176 - protein, 5 aa, synthetic construct
RYTMA

SEQ ID NO: 1177 - protein, 17 aa, synthetic construct
AITWISGSTLYADSVKG

SEQ ID NO: 1178 - protein, 14 aa, synthetic construct
ALKTITRGQNDYSY

SEQ ID NO: 1179 - protein, 5 aa, synthetic construct
RYTMA

SEQ ID NO: 1180 - protein, 17 aa, synthetic construct
SVTDSGRTTDYVASVQG

SEQ ID NO: 1181 - protein, 14 aa, synthetic construct
NTDYFQIRSLDRNT

SEQ ID NO: 1182 - protein, 5 aa, synthetic construct
RYTMA

SEQ ID NO: 1183 - protein, 17 aa, synthetic construct
GISPSGGYAWHADSVKG

SEQ ID NO: 1184 - protein, 18 aa, synthetic construct
DHPPYGAVASRSEYEYDD

SEQ ID NO: 1185 - protein, 5 aa, synthetic construct
RYTMA

SEQ ID NO: 1186 - protein, 17 aa, synthetic construct
SITDSGRTTEYVDSVKG

SEQ ID NO: 1187 - protein, 14 aa, synthetic construct
NTDYFRIRSLDANT

SEQ ID NO: 1188 - protein, 5 aa, synthetic construct
RYTMA

SEQ ID NO: 1189 - protein, 17 aa, synthetic construct
SVTDSGRTTDYVHSVKG

SEQ ID NO: 1190 - protein, 14 aa, synthetic construct
NTDYFQIKSLDANT

SEQ ID NO: 1191 - protein, 5 aa, synthetic construct
RYTMA

SEQ ID NO: 1192 - protein, 17 aa, synthetic construct
AITWLSGSTLYADSVEG

SEQ ID NO: 1193 - protein, 14 aa, synthetic construct
ALKTITRGQNDYSY

SEQ ID NO: 1194 - protein, 5 aa, synthetic construct
RYTMA

SEQ ID NO: 1195 - protein, 17 aa, synthetic construct
VVTDSGRTTEYVDSVKG

SEQ ID NO: 1196 - protein, 14 aa, synthetic construct
NTDYFQIRSVDNNA

SEQ ID NO: 1197 - protein, 5 aa, synthetic construct
RYTMA

SEQ ID NO: 1198 - protein, 17 aa, synthetic construct
AISRSGGSTAYVDSVKG

SEQ ID NO: 1199 - protein, 17 aa, synthetic construct
TAAVGWTSRWITTDFDS

SEQ ID NO: 1200 - protein, 5 aa, synthetic construct
RYTMA

SEQ ID NO: 1201 - protein, 17 aa, synthetic construct
SVTDSGRTTDYVASVQG

SEQ ID NO: 1202 - protein, 14 aa, synthetic construct
NTDYFQIRSLDRNT

SEQ ID NO: 1203 - protein, 5 aa, synthetic construct
RYTMA

SEQ ID NO: 1204 - protein, 17 aa, synthetic construct
VVTDSGRTTEYVDSVKG

SEQ ID NO: 1205 - protein, 14 aa, synthetic construct
NTDYFQIRSVDNNA

SEQ ID NO: 1206 - protein, 5 aa, synthetic construct
RYTMA

SEQ ID NO: 1207 - protein, 17 aa, synthetic construct
AITWTGRGTMYAESVEG

SEQ ID NO: 1208 - protein, 16 aa, synthetic construct
ARRGRAAVRSEGGYDF

SEQ ID NO: 1209 - protein, 5 aa, synthetic construct
RYTMA

SEQ ID NO: 1210 - protein, 17 aa, synthetic construct
LITWSTGRVHYTDSVEG

SEQ ID NO: 1211 - protein, 14 aa, synthetic construct
GRVGYTTNLHSYDY

SEQ ID NO: 1212 - protein, 5 aa, synthetic construct
RYTMA

SEQ ID NO: 1213 - protein, 17 aa, synthetic construct
GITGEGLGTIYQDSVEG

SEQ ID NO: 1214 - protein, 16 aa, synthetic construct
MASGTLFRDKPYEYTS

SEQ ID NO: 1215 - protein, 5 aa, synthetic construct
RYTMA

SEQ ID NO: 1216 - protein, 17 aa, synthetic construct
AISWSASSTYYSESVKG

SEQ ID NO: 1217 - protein, 21 aa, synthetic construct
RASPFVAGSYDPSDDPADYGS

SEQ ID NO: 1218 - protein, 5 aa, synthetic construct
RYTMA

SEQ ID NO: 1219 - protein, 17 aa, synthetic construct
AITWTGRGTMYAESVEG

SEQ ID NO: 1220 - protein, 16 aa, synthetic construct
ARRGRAAVRSEGGYDF

SEQ ID NO: 1221 - protein, 5 aa, synthetic construct
RYTMA

SEQ ID NO: 1222 - protein, 17 aa, synthetic construct
SVTDSGRTTDYVASVQG

SEQ ID NO: 1223 - protein, 14 aa, synthetic construct
NTDYFQIRSLDRNT

SEQ ID NO: 1224 - protein, 5 aa, synthetic construct
RYTMA

SEQ ID NO: 1225 - protein, 17 aa, synthetic construct
SVTDSGRTTDYVASVQG

SEQ ID NO: 1226 - protein, 14 aa, synthetic construct
NTDYFQIRSLDRNT

SEQ ID NO: 1227 - protein, 5 aa, synthetic construct
RYTMA

SEQ ID NO: 1228 - protein, 17 aa, synthetic construct
AITWSSHSTLYADSVEG

SEQ ID NO: 1229 - protein, 16 aa, synthetic construct
VRRGWAVVRTEGAYDF

SEQ ID NO: 1230 - protein, 5 aa, synthetic construct
RYTMA

SEQ ID NO: 1231 - protein, 17 aa, synthetic construct
AVTDSGRTTEYVDSVKG

SEQ ID NO: 1232 - protein, 14 aa, synthetic construct
NTDYFQIRSVDNNA

SEQ ID NO: 1233 - protein, 5 aa, synthetic construct
RYTMA

SEQ ID NO: 1234 - protein, 17 aa, synthetic construct
AITWSGRDTDYADSVKG

SEQ ID NO: 1235 - protein, 18 aa, synthetic construct
YPQGTIGPYFRSSNHYDY

SEQ ID NO: 1236 - protein, 5 aa, synthetic construct
RYTMA

SEQ ID NO: 1237 - protein, 17 aa, synthetic construct
SVTDSGRTTDYVDSVKG

SEQ ID NO: 1238 - protein, 14 aa, synthetic construct
NTDYFQIRSLEFNT

SEQ ID NO: 1239 - protein, 5 aa, synthetic construct
RYTMA

SEQ ID NO: 1240 - protein, 17 aa, synthetic construct
AVTDSGRTADYVDSVKG

SEQ ID NO: 1241 - protein, 14 aa, synthetic construct
NTDYFQIRSLDRNT

SEQ ID NO: 1242 - protein, 5 aa, synthetic construct
RYTMA

SEQ ID NO: 1243 - protein, 17 aa, synthetic construct
IISESGGIIDYGDSVKG

SEQ ID NO: 1244 - protein, 14 aa, synthetic construct
ARDWFARTAYQYDY

SEQ ID NO: 1245 - protein, 5 aa, synthetic construct
RYTMA

SEQ ID NO: 1246 - protein, 17 aa, synthetic construct
SVTDSGRTTDYVASVQG

SEQ ID NO: 1247 - protein, 14 aa, synthetic construct
NTDYFQIRSLDRNT

SEQ ID NO: 1248 - protein, 5 aa, synthetic construct
RYTMA

SEQ ID NO: 1249 - protein, 17 aa, synthetic construct
SVTDSGRTTDYVHSVKG

SEQ ID NO: 1250 - protein, 14 aa, synthetic construct
NTDYFQIRSLDANT

SEQ ID NO: 1251 - protein, 5 aa, synthetic construct
RYTMA

SEQ ID NO: 1252 - protein, 17 aa, synthetic construct
SVTDSGRTTDYVDSVKG

SEQ ID NO: 1253 - protein, 14 aa, synthetic construct
NTDYFQIKSLDLNT

SEQ ID NO: 1254 - protein, 5 aa, synthetic construct
RYTMA

SEQ ID NO: 1255 - protein, 17 aa, synthetic construct
SVTDSGRTTEYVDSVKG

SEQ ID NO: 1256 - protein, 14 aa, synthetic construct
NTDYFQIRSLNLNT

SEQ ID NO: 1257 - protein, 5 aa, synthetic construct
RYTMA

SEQ ID NO: 1258 - protein, 17 aa, synthetic construct
AITWSTGRTSYADSVKG

SEQ ID NO: 1259 - protein, 14 aa, synthetic construct
DQVLWTTRPRDMRY

SEQ ID NO: 1260 - protein, 5 aa, synthetic construct
RYTMA

SEQ ID NO: 1261 - protein, 17 aa, synthetic construct
SVTDSGRTTDYVHSVKG

SEQ ID NO: 1262 - protein, 14 aa, synthetic construct
NTDYFQIKSLDANT

SEQ ID NO: 1263 - protein, 5 aa, synthetic construct
RYTMA

SEQ ID NO: 1264 - protein, 17 aa, synthetic construct
AVTDSGRTTEYVDSVKG

SEQ ID NO: 1265 - protein, 14 aa, synthetic construct
NTDYFQIRSVDNNA

SEQ ID NO: 1266 - protein, 5 aa, synthetic construct
RYTMA

SEQ ID NO: 1267 - protein, 17 aa, synthetic construct
VVTDSGRTTEYVDSVKG

SEQ ID NO: 1268 - protein, 14 aa, synthetic construct
NTDYFQIRSVDNNA

SEQ ID NO: 1269 - protein, 5 aa, synthetic construct
RYTMA

SEQ ID NO: 1270 - protein, 17 aa, synthetic construct
TVTDSGRTTEYVDSVKG

SEQ ID NO: 1271 - protein, 14 aa, synthetic construct
NTDYFRIRSLDANT

SEQ ID NO: 1272 - protein, 5 aa, synthetic construct
RYTMA

SEQ ID NO: 1273 - protein, 17 aa, synthetic construct
SVTDSGRTTDYVDSVKG

SEQ ID NO: 1274 - protein, 14 aa, synthetic construct
NTDYFQIKSLDLNT

SEQ ID NO: 1275 - protein, 5 aa, synthetic construct
RYTMA

SEQ ID NO: 1276 - protein, 17 aa, synthetic construct
VVTDSGRTTEYVDSVKG

SEQ ID NO: 1277 - protein, 14 aa, synthetic construct
NTDYFQIRSVDNNA

SEQ ID NO: 1278 - protein, 5 aa, synthetic construct
RYTMA

SEQ ID NO: 1279 - protein, 17 aa, synthetic construct
SVTDSGRTTEYVDSVKG

SEQ ID NO: 1280 - protein, 14 aa, synthetic construct
NTDYFQIRSLDLNT

SEQ ID NO: 1281 - protein, 5 aa, synthetic construct
RYTMA

SEQ ID NO: 1282 - protein, 17 aa, synthetic construct
SVTDSGRTTDYVDSVKG

SEQ ID NO: 1283 - protein, 14 aa, synthetic construct
NTDYFQIRSLEFNT

SEQ ID NO: 1284 - protein, 5 aa, synthetic construct
RYTMA

SEQ ID NO: 1285 - protein, 17 aa, synthetic construct
SVTDSGRTTEYVDSVKG

SEQ ID NO: 1286 - protein, 14 aa, synthetic construct
NTDYFQIRSLDLNT

SEQ ID NO: 1287 - protein, 5 aa, synthetic construct
RYTMA

SEQ ID NO: 1288 - protein, 17 aa, synthetic construct
SVTDSGRTTDYVDSVKG

SEQ ID NO: 1289 - protein, 14 aa, synthetic construct
NTDYFQIKSLDRNT

SEQ ID NO: 1290 - protein, 5 aa, synthetic construct
RYTMA

SEQ ID NO: 1291 - protein, 17 aa, synthetic construct
VVTDSGRTTEYVDSVKG

SEQ ID NO: 1292 - protein, 14 aa, synthetic construct
NTDYFQIRSVDNNA

SEQ ID NO: 1293 - protein, 5 aa, synthetic construct
RYTMA

SEQ ID NO: 1294 - protein, 17 aa, synthetic construct
SVTDSGRTTEYVDSVKG

SEQ ID NO: 1295 - protein, 14 aa, synthetic construct
NTDYFQIRSLDLNT

SEQ ID NO: 1296 - protein, 5 aa, synthetic construct
RYTMA

SEQ ID NO: 1297 - protein, 17 aa, synthetic construct
SVTDSGRTTEYVDSVKG

SEQ ID NO: 1298 - protein, 14 aa, synthetic construct
NTDYFQIRSLDLNT

SEQ ID NO: 1299 - protein, 5 aa, synthetic construct
RYTMA

SEQ ID NO: 1300 - protein, 17 aa, synthetic construct
SVTDSGRTTDYVDSVKG

SEQ ID NO: 1301 - protein, 14 aa, synthetic construct
NTDYFQIRSLEFNT

SEQ ID NO: 1302 - protein, 5 aa, synthetic construct
RYTMA

SEQ ID NO: 1303 - protein, 17 aa, synthetic construct
VVTDSGRTTEYVDSVKG

SEQ ID NO: 1304 - protein, 14 aa, synthetic construct
NTDYFQIRSVDNNA

SEQ ID NO: 1305 - protein, 5 aa, synthetic construct
RYTMA

SEQ ID NO: 1306 - protein, 17 aa, synthetic construct
SVTDSGRTTEYVDSVKG

SEQ ID NO: 1307 - protein, 14 aa, synthetic construct
NTDYFQIRSLDLNT

SEQ ID NO: 1308 - protein, 5 aa, synthetic construct
RYTMA

SEQ ID NO: 1309 - protein, 17 aa, synthetic construct
SVTDSGRTTEYVDSVKG

SEQ ID NO: 1310 - protein, 14 aa, synthetic construct
NTDYFQIRSLRANT

SEQ ID NO: 1311 - protein, 5 aa, synthetic construct
RYTMA

SEQ ID NO: 1312 - protein, 17 aa, synthetic construct
VVTDSGRTTEYVDSVKG

SEQ ID NO: 1313 - protein, 14 aa, synthetic construct
NTDYFQIRSVDNNA

SEQ ID NO: 1314 - protein, 5 aa, synthetic construct
RYTMA

SEQ ID NO: 1315 - protein, 17 aa, synthetic construct
SVTDSGRTTEYVDSVKG

SEQ ID NO: 1316 - protein, 14 aa, synthetic construct
NTDYFQIRSLDLNT

SEQ ID NO: 1317 - protein, 5 aa, synthetic construct
RYTMA

SEQ ID NO: 1318 - protein, 17 aa, synthetic construct
SVTDSGRTTDYVHSVKG

SEQ ID NO: 1319 - protein, 14 aa, synthetic construct
NTDYFQIKSLDANT

SEQ ID NO: 1320 - protein, 5 aa, synthetic construct
RYTMA

SEQ ID NO: 1321 - protein, 17 aa, synthetic construct
SVTDSGRTTDYVDSVKG

SEQ ID NO: 1322 - protein, 14 aa, synthetic construct
NTDYFQIRSLEFNT

SEQ ID NO: 1323 - protein, 5 aa, synthetic construct
RYTMA

SEQ ID NO: 1324 - protein, 17 aa, synthetic construct
VVTDSGRTTEYVDSVKG

SEQ ID NO: 1325 - protein, 14 aa, synthetic construct
NTDYFQIRSVDNNA

SEQ ID NO: 1326 - protein, 5 aa, synthetic construct
RYTMA

SEQ ID NO: 1327 - protein, 17 aa, synthetic construct
SVTDSGRTTEYVDSVKG

SEQ ID NO: 1328 - protein, 14 aa, synthetic construct
NTDYFQIRSLRANT

SEQ ID NO: 1329 - protein, 5 aa, synthetic construct
RYTMA

SEQ ID NO: 1330 - protein, 17 aa, synthetic construct
VVTDSGRTTEYVGSVKG

SEQ ID NO: 1331 - protein, 14 aa, synthetic construct
NTDYFQIRSVDNNA

SEQ ID NO: 1332 - protein, 5 aa, synthetic construct
RYTMA

SEQ ID NO: 1333 - protein, 17 aa, synthetic construct
SVTDSGRTTDYVASVQG

SEQ ID NO: 1334 - protein, 14 aa, synthetic construct
NTDYFQIRSLDRNT

SEQ ID NO: 1335 - protein, 5 aa, synthetic construct
RYTMA

SEQ ID NO: 1336 - protein, 17 aa, synthetic construct
SVTDSGRTTEYVDSVKG

SEQ ID NO: 1337 - protein, 14 aa, synthetic construct
NTDYFQIRSLDLNT

SEQ ID NO: 1338 - protein, 5 aa, synthetic construct
RYTMA

SEQ ID NO: 1339 - protein, 17 aa, synthetic construct
VVTDSGRTTEYVDSVKG

SEQ ID NO: 1340 - protein, 14 aa, synthetic construct
NTDYFQIRSVDNNA

SEQ ID NO: 1341 - protein, 5 aa, synthetic construct
RYTMA

SEQ ID NO: 1342 - protein, 17 aa, synthetic construct
SVTDSGRTTEYVDSVKG

SEQ ID NO: 1343 - protein, 14 aa, synthetic construct
NTDYFQIRSLDLNT

SEQ ID NO: 1344 - protein, 5 aa, synthetic construct
RYTMA

SEQ ID NO: 1345 - protein, 17 aa, synthetic construct
SVTDSGRTTEYVDSVKG

SEQ ID NO: 1346 - protein, 14 aa, synthetic construct
NTDYFQIRSLDLNT

SEQ ID NO: 1347 - protein, 5 aa, synthetic construct
RYTMA

SEQ ID NO: 1348 - protein, 17 aa, synthetic construct
SVTDSGRTTDYVDSVKG

SEQ ID NO: 1349 - protein, 14 aa, synthetic construct
NTDYFQIRSLEFNT

SEQ ID NO: 1350 - protein, 5 aa, synthetic construct
RYTMA

SEQ ID NO: 1351 - protein, 17 aa, synthetic construct
SVTDSGRTTEYVDSVKG

SEQ ID NO: 1352 - protein, 14 aa, synthetic construct
NTDYFQIRSLDLNT

SEQ ID NO: 1353 - protein, 5 aa, synthetic construct
RYTMA

SEQ ID NO: 1354 - protein, 17 aa, synthetic construct
SVTDSGRTTEYVDSVKG

SEQ ID NO: 1355 - protein, 14 aa, synthetic construct
NTDYFQIRSLDLNT

SEQ ID NO: 1356 - protein, 5 aa, synthetic construct
RYTMA

SEQ ID NO: 1357 - protein, 17 aa, synthetic construct
IISESGGIKEYVDSVKG

SEQ ID NO: 1358 - protein, 14 aa, synthetic construct
ARDWFARNEYQYDY

SEQ ID NO: 1359 - protein, 5 aa, synthetic construct
RYTMA

SEQ ID NO: 1360 - protein, 17 aa, synthetic construct
SVTDSGRTTEYVDSVKG

SEQ ID NO: 1361 - protein, 14 aa, synthetic construct
NTDYFQIRSLDLNT

SEQ ID NO: 1362 - protein, 5 aa, synthetic construct
RYTMA

SEQ ID NO: 1363 - protein, 17 aa, synthetic construct
SVTDSGRTTEYVDSVKG

SEQ ID NO: 1364 - protein, 14 aa, synthetic construct
NTDYFQIRSLDLNT

SEQ ID NO: 1365 - protein, 5 aa, synthetic construct
RYTMA

SEQ ID NO: 1366 - protein, 17 aa, synthetic construct
SVTDSGRTTEYVDSVKG

SEQ ID NO: 1367 - protein, 14 aa, synthetic construct
NTDYFQIRSLDLNT

SEQ ID NO: 1368 - protein, 5 aa, synthetic construct
RYTMA

SEQ ID NO: 1369 - protein, 17 aa, synthetic construct
SVTDSGRTTEYVDSVKG

SEQ ID NO: 1370 - protein, 14 aa, synthetic construct
NTDYFQIRSLNLNT

SEQ ID NO: 1371 - protein, 5 aa, synthetic construct
RYTMA

SEQ ID NO: 1372 - protein, 17 aa, synthetic construct
SVTDSGRTTEYVDSVKG

SEQ ID NO: 1373 - protein, 14 aa, synthetic construct
NTDYFQIRSLNLNT

SEQ ID NO: 1374 - protein, 5 aa, synthetic construct
RYTMA

SEQ ID NO: 1375 - protein, 17 aa, synthetic construct
SVTDSGRTTEYVDSVKG

SEQ ID NO: 1376 - protein, 14 aa, synthetic construct
NTDYFQIRSLDLNT

SEQ ID NO: 1377 - protein, 5 aa, synthetic construct
RYTMA

SEQ ID NO: 1378 - protein, 17 aa, synthetic construct
SVTDSGRTTDYVDSVKG

SEQ ID NO: 1379 - protein, 14 aa, synthetic construct
NTDYFQIKSLDRNT

SEQ ID NO: 1380 - protein, 5 aa, synthetic construct
RYTMA

SEQ ID NO: 1381 - protein, 17 aa, synthetic construct
SVTDSGRTTEYVDSVKG

SEQ ID NO: 1382 - protein, 14 aa, synthetic construct
NTDYFQIRSLDLNT

SEQ ID NO: 1383 - protein, 5 aa, synthetic construct
RYTMA

SEQ ID NO: 1384 - protein, 17 aa, synthetic construct
SVTDSGRTTEYVDSVKG

SEQ ID NO: 1385 - protein, 14 aa, synthetic construct
NTDYFQIRSLRANT

SEQ ID NO: 1386 - protein, 5 aa, synthetic construct
RYTMA

SEQ ID NO: 1387 - protein, 17 aa, synthetic construct
AITWLSGSTLYADSVEG

SEQ ID NO: 1388 - protein, 14 aa, synthetic construct
ALKTITRGQNDYSY

SEQ ID NO: 1389 - protein, 5 aa, synthetic construct
RYTMA

SEQ ID NO: 1390 - protein, 17 aa, synthetic construct
SVTDSGRTTDYVDSVKG

SEQ ID NO: 1391 - protein, 14 aa, synthetic construct
NTDYFQIKSLDRNT

SEQ ID NO: 1392 - protein, 5 aa, synthetic construct
RYTMA

SEQ ID NO: 1393 - protein, 17 aa, synthetic construct
SVTDSGRTTEYVDSVKG

SEQ ID NO: 1394 - protein, 14 aa, synthetic construct
NTDYFQIRSLDLNT

SEQ ID NO: 1395 - protein, 5 aa, synthetic construct
RYTMA

SEQ ID NO: 1396 - protein, 17 aa, synthetic construct
SVTDSGRTTEYVDSVKG

SEQ ID NO: 1397 - protein, 14 aa, synthetic construct
NTDYFQIRSLDLNT

SEQ ID NO: 1398 - protein, 5 aa, synthetic construct
RYTMA

SEQ ID NO: 1399 - protein, 17 aa, synthetic construct
SVTDSGRTTEYVDSVKG

SEQ ID NO: 1400 - protein, 14 aa, synthetic construct
NTDYFQIRSLNLNT

SEQ ID NO: 1401 - protein, 5 aa, synthetic construct
RYTMA

SEQ ID NO: 1402 - protein, 17 aa, synthetic construct
SVTDSGRTTDYVDSVKG

SEQ ID NO: 1403 - protein, 14 aa, synthetic construct
NTDYFQIKSLDLNT

SEQ ID NO: 1404 - skipped

SEQ ID NO: 1405 - protein, 5 aa, synthetic construct
RYAMG

SEQ ID NO: 1406 - protein, 16 aa, synthetic construct
ANSWGGDTYYADSVQG

SEQ ID NO: 1407 - protein, 18 aa, synthetic construct
APTSFATTAYSSSNSYAY

SEQ ID NO: 1408 - protein, 5 aa, synthetic construct
RYAMG

SEQ ID NO: 1409 - protein, 16 aa, synthetic construct
ASSWGGDTYYADSVEG

SEQ ID NO: 1410 - protein, 18 aa, synthetic construct
APTSFATTAYSSSNSYAY

SEQ ID NO: 1411 - protein, 5 aa, synthetic construct
TDVVG

SEQ ID NO: 1412 - protein, 17 aa, synthetic construct
SISRSGDGIYYDDSVKG

SEQ ID NO: 1413 - protein, 9 aa, synthetic construct
GDGWSTYDY

SEQ ID NO: 1414 - protein, 5 aa, synthetic construct
RYAMG

SEQ ID NO: 1415 - protein, 16 aa, synthetic construct
ANSWGGDTYYADSVQG

SEQ ID NO: 1416 - protein, 18 aa, synthetic construct
APTSFATTAYSSSNSYAY

SEQ ID NO: 1417 - protein, 5 aa, synthetic construct
RYAMG

SEQ ID NO: 1418 - protein, 16 aa, synthetic construct
ANSWGGDTYYADSVQG

SEQ ID NO: 1419 - protein, 18 aa, synthetic construct
APTSFATTAYSSSNSYAY

SEQ ID NO: 1420 - protein, 5 aa, synthetic construct
RYAMG

SEQ ID NO: 1421 - protein, 16 aa, synthetic construct
ANSWGGDTYYADSVQG

SEQ ID NO: 1422 - protein, 18 aa, synthetic construct
APTSFATTAYSSSNSYAY

SEQ ID NO: 1423 - protein, 5 aa, synthetic construct
RYAMG

SEQ ID NO: 1424 - protein, 16 aa, synthetic construct
ANSWGGDTYYADSVQG

SEQ ID NO: 1425 - protein, 18 aa, synthetic construct
APTSFATTAYSSSNSYAY

SEQ ID NO: 1426 - protein, 5 aa, synthetic construct
RYAMG

SEQ ID NO: 1427 - protein, 16 aa, synthetic construct
ANSWGGDTYYADSVQG

SEQ ID NO: 1428 - protein, 18 aa, synthetic construct
APTSFATTAYSSSNSYAY

SEQ ID NO: 1429 - protein, 5 aa, synthetic construct
SGIMG

SEQ ID NO: 1430 - protein, 17 aa, synthetic construct
RIILNNNSTRYTDSVKG

SEQ ID NO: 1431 - protein, 17 aa, synthetic construct
RDRYGSGNSLSPSAYDY

SEQ ID NO: 1432 - protein, 5 aa, synthetic construct
RYAMG

SEQ ID NO: 1433 - protein, 16 aa, synthetic construct
ANSWGGDTYYADSVQG

SEQ ID NO: 1434 - protein, 18 aa, synthetic construct
APTSFATTAYSSSNSYAY

SEQ ID NO: 1435 - protein, 5 aa, synthetic construct
SGIMG

SEQ ID NO: 1436 - protein, 17 aa, synthetic construct
RIILNNNSTRYTDSVKG

SEQ ID NO: 1437 - protein, 17 aa, synthetic construct
RDRYGSGNSLSPSAYDY

SEQ ID NO: 1438 - protein, 5 aa, synthetic construct
RDVVG

SEQ ID NO: 1439 - protein, 17 aa, synthetic construct
SISRSGDGTFYTDSVKG

SEQ ID NO: 1440 - protein, 9 aa, synthetic construct
GDGWSTYDY

SEQ ID NO: 1441 - protein, 5 aa, synthetic construct
RYAMG

SEQ ID NO: 1442 - protein, 16 aa, synthetic construct
ANSWGGDTYYADSVQG

SEQ ID NO: 1443 - protein, 18 aa, synthetic construct
APTSFATTAYSSSNSYAY

SEQ ID NO: 1444 - protein, 5 aa, synthetic construct
SGIMG

SEQ ID NO: 1445 - protein, 17 aa, synthetic construct
RIILNNNSTRYTDSVKG

SEQ ID NO: 1446 - protein, 17 aa, synthetic construct
RDRYGSGNSLSPSAYDY

SEQ ID NO: 1447 - protein, 5 aa, synthetic construct
RVAVA

SEQ ID NO: 1448 - protein, 17 aa, synthetic construct
VVNRPGTMTKYADSVKG

SEQ ID NO: 1449 - protein, 20 aa, synthetic construct
DSVPYGRPYYFQTSAGNYDY

SEQ ID NO: 1450 - protein, 5 aa, synthetic construct
RYAMG

SEQ ID NO: 1451 - protein, 16 aa, synthetic construct
ANSWGGDTYYADSVQG

SEQ ID NO: 1452 - protein, 18 aa, synthetic construct
APTSFATTAYSSSNSYAY

SEQ ID NO: 1453 - protein, 5 aa, synthetic construct
RNAMG

SEQ ID NO: 1454 - protein, 16 aa, synthetic construct
ADSWGGDTFYADSVEG

SEQ ID NO: 1455 - protein, 18 aa, synthetic construct
APTSFATTAYSSSNSYRY

SEQ ID NO: 1456 - protein, 5 aa, synthetic construct
SGIMG

SEQ ID NO: 1457 - protein, 17 aa, synthetic construct
RIILNNNSTRYTDSVKG

SEQ ID NO: 1458 - protein, 17 aa, synthetic construct
RDRYGSGNSLSPSAYDY

SEQ ID NO: 1459 - protein, 5 aa, synthetic construct
RYAMG

SEQ ID NO: 1460 - protein, 16 aa, synthetic construct
ADSWGGDTFYADSVEG

SEQ ID NO: 1461 - protein, 18 aa, synthetic construct
APTSFATTAYSSSNSYRY

SEQ ID NO: 1462 - protein, 5 aa, synthetic construct
RVAVA

SEQ ID NO: 1463 - protein, 17 aa, synthetic construct
VVNRPGTMTKYADSVKG

SEQ ID NO: 1464 - protein, 20 aa, synthetic construct
DSVPYGRPYYFQTSAGNYDY

SEQ ID NO: 1465 - protein, 5 aa, synthetic construct
RYAMG

SEQ ID NO: 1466 - protein, 16 aa, synthetic construct
ANSWGGDTYYADSVQG

SEQ ID NO: 1467 - protein, 18 aa, synthetic construct
APTSFATTAYSSSNSYAY

SEQ ID NO: 1468 - protein, 5 aa, synthetic construct
SGIMG

SEQ ID NO: 1469 - protein, 17 aa, synthetic construct
RIILNSNSTRYTDSVKG

SEQ ID NO: 1470 - protein, 17 aa, synthetic construct
RDRYGSGNSLSPSAYDY

SEQ ID NO: 1471 - protein, 5 aa, synthetic construct
RYAVG

SEQ ID NO: 1472 - protein, 16 aa, synthetic construct
ANSWGGDTFYADSVQG

SEQ ID NO: 1473 - protein, 18 aa, synthetic construct
APTSFATTAYSSSNSYKV

SEQ ID NO: 1474 - protein, 5 aa, synthetic construct
RYAMG

SEQ ID NO: 1475 - protein, 16 aa, synthetic construct
ANSWGGDTYYADSVQG

SEQ ID NO: 1476 - protein, 18 aa, synthetic construct
APTSFATTAYSSSNSYAY

SEQ ID NO: 1477 - protein, 5 aa, synthetic construct
SGIMG

SEQ ID NO: 1478 - protein, 17 aa, synthetic construct
RIILNNNSTRYTDSVKG

SEQ ID NO: 1479 - protein, 17 aa, synthetic construct
RDRYGSGNSLSPSAYDY

SEQ ID NO: 1480 - protein, 5 aa, synthetic construct
RYAMG

SEQ ID NO: 1481 - protein, 16 aa, synthetic construct
ANSWGGDTYYADSVQG

SEQ ID NO: 1482 - protein, 18 aa, synthetic construct
APTSFATTAYSSSNSYAY

SEQ ID NO: 1483 - protein, 5 aa, synthetic construct
RYAMG

SEQ ID NO: 1484 - protein, 16 aa, synthetic construct
ANSWGGDTYYADSVQG

SEQ ID NO: 1485 - protein, 18 aa, synthetic construct
APTSFATTAYSSSNSYAY

SEQ ID NO: 1486 - protein, 5 aa, synthetic construct
SGIMG

SEQ ID NO: 1487 - protein, 17 aa, synthetic construct
RIILNNNSTRYTDSVKG

SEQ ID NO: 1488 - protein, 17 aa, synthetic construct
RDRYGSGNSLSPSAYDY

SEQ ID NO: 1489 - protein, 5 aa, synthetic construct
RYAMG

SEQ ID NO: 1490 - protein, 16 aa, synthetic construct
ANSWGGDTYYADSVQG

SEQ ID NO: 1491 - protein, 18 aa, synthetic construct
APTSFATTAYSSSNSYAY

SEQ ID NO: 1492 - protein, 5 aa, synthetic construct
RLAMG

SEQ ID NO: 1493 - protein, 16 aa, synthetic construct
ASSWGDDTFYADSVKG

SEQ ID NO: 1494 - protein, 18 aa, synthetic construct
APTSFATTAYSSSNSYAY

SEQ ID NO: 1495 - protein, 5 aa, synthetic construct
RYAMG

SEQ ID NO: 1496 - protein, 16 aa, synthetic construct
ANSWGGDTYYADSVQG

SEQ ID NO: 1497 - protein, 18 aa, synthetic construct
APTSFATTAYSSSNSYAY

SEQ ID NO: 1498 - protein, 5 aa, synthetic construct
SGIMG

SEQ ID NO: 1499 - protein, 17 aa, synthetic construct
RIILNNNSTRYIDSVKG

SEQ ID NO: 1500 - protein, 17 aa, synthetic construct
RDRYGSGNSLSPSAYDY

SEQ ID NO: 1501 - protein, 5 aa, synthetic construct
SGIMG

SEQ ID NO: 1502 - protein, 17 aa, synthetic construct
RIILNNNSTRYTDSVKG

SEQ ID NO: 1503 - protein, 17 aa, synthetic construct
RDRYGSGNSLSPSAYDY

SEQ ID NO: 1504 - protein, 5 aa, synthetic construct
RYAMG

SEQ ID NO: 1505 - protein, 16 aa, synthetic construct
ATSWGGDTYYADSVEG

SEQ ID NO: 1506 - protein, 18 aa, synthetic construct
APTSFATTAYSSSNSYAY

SEQ ID NO: 1507 - protein, 5 aa, synthetic construct
RYAMG

SEQ ID NO: 1508 - protein, 16 aa, synthetic construct
ANSWGGDTYYADSVQG

SEQ ID NO: 1509 - protein, 18 aa, synthetic construct
APTSFATTAYSSSNSYAY

SEQ ID NO: 1510 - protein, 5 aa, synthetic construct
SGIMG

SEQ ID NO: 1511 - protein, 17 aa, synthetic construct
RIILNNNSTRYTDSVKG

SEQ ID NO: 1512 - protein, 17 aa, synthetic construct
RDRYGSGNSLSPSAYDY

SEQ ID NO: 1513 - protein, 5 aa, synthetic construct
RYAMG

SEQ ID NO: 1514 - protein, 16 aa, synthetic construct
ANSWGGDTYYADSVQG

SEQ ID NO: 1515 - protein, 18 aa, synthetic construct
APTSFATTAYSSSNSYAY

SEQ ID NO: 1516 - protein, 5 aa, synthetic construct
RYAMG

SEQ ID NO: 1517 - protein, 16 aa, synthetic construct
ANSWGGDTYYADSVQG

SEQ ID NO: 1518 - protein, 18 aa, synthetic construct
APTSFATTAYSSSNSYAY

SEQ ID NO: 1519 - protein, 5 aa, synthetic construct
RVAVA

SEQ ID NO: 1520 - protein, 17 aa, synthetic construct
VVNRPGTMTKYADSVKG

SEQ ID NO: 1521 - protein, 20 aa, synthetic construct
DSVPYGRPYYFQTSAGNYDY

SEQ ID NO: 1522 - protein, 5 aa, synthetic construct
RYAMG

SEQ ID NO: 1523 - protein, 16 aa, synthetic construct
ANSWGGDTYYADSVQG

SEQ ID NO: 1524 - protein, 18 aa, synthetic construct
APTSFATTAYSSSNSYAY

SEQ ID NO: 1525 - protein, 5 aa, synthetic construct
SGIMG

SEQ ID NO: 1526 - protein, 17 aa, synthetic construct
RIILNNNSTRYTDSVKG

SEQ ID NO: 1527 - protein, 17 aa, synthetic construct
RDRYGSGNSLSPSAYDY

SEQ ID NO: 1528 - protein, 5 aa, synthetic construct
RVAVA

SEQ ID NO: 1529 - protein, 17 aa, synthetic construct
VVNRPGTMTKYADSVKG

SEQ ID NO: 1530 - protein, 20 aa, synthetic construct
DSVPYGRPYYFQTSAGNYDY

SEQ ID NO: 1531 - protein, 5 aa, synthetic construct
AVAVG

SEQ ID NO: 1532 - protein, 17 aa, synthetic construct
AINRNGSATKYADSAKG

SEQ ID NO: 1533 - protein, 20 aa, synthetic construct
DSLPYGRPYYFQTSAGEYDY

SEQ ID NO: 1534 - protein, 5 aa, synthetic construct
RYAMG

SEQ ID NO: 1535 - protein, 16 aa, synthetic construct
ANSWGGDTYYADSVQG

SEQ ID NO: 1536 - protein, 18 aa, synthetic construct
APTSFATTAYSSSNSYAY

SEQ ID NO: 1537 - protein, 5 aa, synthetic construct
RGIMG

SEQ ID NO: 1538 - protein, 17 aa, synthetic construct
RIILNSNSTRYIDSVKG

SEQ ID NO: 1539 - protein, 17 aa, synthetic construct
RDRYGSGNSLSPSAYDY

SEQ ID NO: 1540 - protein, 5 aa, synthetic construct
RYAMG

SEQ ID NO: 1541 - protein, 16 aa, synthetic construct
ANSWGGDTYYADSVQG

SEQ ID NO: 1542 - protein, 18 aa, synthetic construct
APTSFATTAYSSSNSYAY

SEQ ID NO: 1543 - protein, 5 aa, synthetic construct
RGIMG

SEQ ID NO: 1544 - protein, 17 aa, synthetic construct
RIILNNNSTRYTDSVKG

SEQ ID NO: 1545 - protein, 17 aa, synthetic construct
RDRYGSGNSLSPSAYDY

SEQ ID NO: 1546 - protein, 5 aa, synthetic construct
RVAVG

SEQ ID NO: 1547 - protein, 17 aa, synthetic construct
AVNRPATMTKYADSVKG

SEQ ID NO: 1548 - protein, 20 aa, synthetic construct
DSVPYGRPYYFQTSAGEYDY

SEQ ID NO: 1549 - protein, 5 aa, synthetic construct
SGIMG

SEQ ID NO: 1550 - protein, 17 aa, synthetic construct
RIILNNNSTRYTDSVKG

SEQ ID NO: 1551 - protein, 17 aa, synthetic construct
RDRYGSGNSLSPSAYDY

SEQ ID NO: 1552 - protein, 5 aa, synthetic construct
SGIMG

SEQ ID NO: 1553 - protein, 17 aa, synthetic construct
RIILNNNSTRYTDSVKG

SEQ ID NO: 1554 - protein, 17 aa, synthetic construct
RDRYGSGNSLSPSAYDY

SEQ ID NO: 1555 - protein, 5 aa, synthetic construct
SGIMG

SEQ ID NO: 1556 - protein, 17 aa, synthetic construct
RIILNNNSTRYIDSVKG

SEQ ID NO: 1557 - protein, 17 aa, synthetic construct
RDRYGSGNSLSPSAYDY

SEQ ID NO: 1558 - protein, 5 aa, synthetic construct
SGIMG

SEQ ID NO: 1559 - protein, 17 aa, synthetic construct
RIILNNNSTRYTDSVKG

SEQ ID NO: 1560 - protein, 17 aa, synthetic construct
RDRYGSGNSLSPSAYDY

SEQ ID NO: 1561 - protein, 5 aa, synthetic construct
RYAMG

SEQ ID NO: 1562 - protein, 16 aa, synthetic construct
ANSWGGDTYYADSVQG

SEQ ID NO: 1563 - protein, 18 aa, synthetic construct
APTSFATTAYSSSNSYAY

SEQ ID NO: 1564 - protein, 5 aa, synthetic construct
SGIMG

SEQ ID NO: 1565 - protein, 17 aa, synthetic construct
RIISNNNSTRYTDSVKG

SEQ ID NO: 1566 - protein, 17 aa, synthetic construct
RDRYGSGNSLSPSAYDY

SEQ ID NO: 1567 - protein, 5 aa, synthetic construct
SGIMG

SEQ ID NO: 1568 - protein, 17 aa, synthetic construct
RIILNSNSTRYTDSAKG

SEQ ID NO: 1569 - protein, 17 aa, synthetic construct
RDRYGSGNSLSPSAYDY

SEQ ID NO: 1570 - protein, 5 aa, synthetic construct
SGIMG

SEQ ID NO: 1571 - protein, 17 aa, synthetic construct
RIILNNNSTRYIDSVKG

SEQ ID NO: 1572 - protein, 17 aa, synthetic construct
RDRYGSGNSLSPSAYDY

SEQ ID NO: 1573 - protein, 5 aa, synthetic construct
RVAVA

SEQ ID NO: 1574 - protein, 17 aa, synthetic construct
VVNRPGTMTKYADSVKG

SEQ ID NO: 1575 - protein, 20 aa, synthetic construct
DSVPYGRPYYFQTSAGNYDY

SEQ ID NO: 1576 - protein, 5 aa, synthetic construct
SGIMG

SEQ ID NO: 1577 - protein, 17 aa, synthetic construct
RIILNNNSTRYIDSVKG

SEQ ID NO: 1578 - protein, 17 aa, synthetic construct
RDRYGSGNSLSPSAYDY

SEQ ID NO: 1579 - protein, 5 aa, synthetic construct
RVAVG

SEQ ID NO: 1580 - protein, 17 aa, synthetic construct
VVNRPGSMTKYADSVKG

SEQ ID NO: 1581 - protein, 20 aa, synthetic construct
DSVPYGRPYYFTTSAGDYDY

SEQ ID NO: 1582 - protein, 5 aa, synthetic construct
AVAVG

SEQ ID NO: 1583 - protein, 17 aa, synthetic construct
AINRSGSATKYADSVKG

SEQ ID NO: 1584 - protein, 20 aa, synthetic construct
DSLPYGRPYYFQTSAGEYDY

SEQ ID NO: 1585 - protein, 5 aa, synthetic construct
RYAMG

SEQ ID NO: 1586 - protein, 16 aa, synthetic construct
ANSWGGDTYYADSVQG

SEQ ID NO: 1587 - protein, 18 aa, synthetic construct
APTSFATTAYSSSNSYAY

SEQ ID NO: 1588 - protein, 5 aa, synthetic construct
SGIMG

SEQ ID NO: 1589 - protein, 17 aa, synthetic construct
RIILNNNSTRYTDSVKG

SEQ ID NO: 1590 - protein, 17 aa, synthetic construct
RDRYGSGNSLSPSAYDY

SEQ ID NO: 1591 - protein, 5 aa, synthetic construct
SGIMG

SEQ ID NO: 1592 - protein, 17 aa, synthetic construct
RIILNNNSTRYTDSVKG

SEQ ID NO: 1593 - protein, 17 aa, synthetic construct
RDRYGSGNSLSPSAYDY

SEQ ID NO: 1594 - protein, 5 aa, synthetic construct
SGIMG

SEQ ID NO: 1595 - protein, 17 aa, synthetic construct
RIILNNNSTRYTDSVKG

SEQ ID NO: 1596 - protein, 17 aa, synthetic construct
RDRYGSGNSLSPSAYDY

SEQ ID NO: 1597 - protein, 5 aa, synthetic construct
RYAMG

SEQ ID NO: 1598 - protein, 16 aa, synthetic construct
ANSWGGDTYYADSVQG

SEQ ID NO: 1599 - protein, 18 aa, synthetic construct
APTSFATTAYSSSNSYAY

SEQ ID NO: 1600 - protein, 5 aa, synthetic construct
SGIMG

SEQ ID NO: 1601 - protein, 17 aa, synthetic construct
RIILNNNSTRYIDSVKG

SEQ ID NO: 1602 - protein, 17 aa, synthetic construct
RDRYGSGNSLSPSAYDY

SEQ ID NO: 1603 - protein, 5 aa, synthetic construct
SGIMG

SEQ ID NO: 1604 - protein, 17 aa, synthetic construct
RIILNNNSTRYIDSVKG

SEQ ID NO: 1605 - protein, 17 aa, synthetic construct
RDRYGSGNSLSPSAYDY

SEQ ID NO: 1606 - protein, 5 aa, synthetic construct
SGIMG

SEQ ID NO: 1607 - protein, 17 aa, synthetic construct
RIILNNNSTRYTDSVKG

SEQ ID NO: 1608 - protein, 17 aa, synthetic construct
RDRYGSGNSLSPSAYDY

SEQ ID NO: 1609 - protein, 5 aa, synthetic construct
SGIMG

SEQ ID NO: 1610 - protein, 17 aa, synthetic construct
RIILNNNSTRYTDSVKG

SEQ ID NO: 1611 - protein, 17 aa, synthetic construct
RDRYGSGNSLSPSAYDY

SEQ ID NO: 1612 - protein, 5 aa, synthetic construct
RYAMG

SEQ ID NO: 1613 - protein, 16 aa, synthetic construct
ANSWGGDTYYADSVQG

SEQ ID NO: 1614 - protein, 18 aa, synthetic construct
APTSFATTAYSSSNSYAY

SEQ ID NO: 1615 - protein, 5 aa, synthetic construct
RYAMG

SEQ ID NO: 1616 - protein, 16 aa, synthetic construct
ANSWGGDTYYADSVQG

SEQ ID NO: 1617 - protein, 18 aa, synthetic construct
APTSFATTAYSSSNSYAY

SEQ ID NO: 1618 - protein, 5 aa, synthetic construct
RCAMG

SEQ ID NO: 1619 - protein, 16 aa, synthetic construct
ISSWGGDTFYEDSVEG

SEQ ID NO: 1620 - protein, 18 aa, synthetic construct
APTSFATTAYSSSNSYAY

SEQ ID NO: 1621 - protein, 5 aa, synthetic construct
RYAMG

SEQ ID NO: 1622 - protein, 16 aa, synthetic construct
ANSWGGDTYYTDSVEG

SEQ ID NO: 1623 - protein, 18 aa, synthetic construct
APTSFATTAYSSSNSYSY

SEQ ID NO: 1624 - protein, 5 aa, synthetic construct
RYAMG

SEQ ID NO: 1625 - protein, 16 aa, synthetic construct
CDSWGGDTFYADSVEG

SEQ ID NO: 1626 - protein, 18 aa, synthetic construct
APTSFATTAYSSSNSYTV

SEQ ID NO: 1627 - protein, 5 aa, synthetic construct
RYAMG

SEQ ID NO: 1628 - protein, 16 aa, synthetic construct
ANSWGGDTYYADSVQG

SEQ ID NO: 1629 - protein, 18 aa, synthetic construct
APTSFATTAYSSSNSYAY

SEQ ID NO: 1630 - protein, 5 aa, synthetic construct
RYAMG

SEQ ID NO: 1631 - protein, 16 aa, synthetic construct
CDSWGGDTFYADSVKG

SEQ ID NO: 1632 - protein, 18 aa, synthetic construct
APTSFATTAYSSSNSYAY

SEQ ID NO: 1633 - protein, 5 aa, synthetic construct
RLAMG

SEQ ID NO: 1634 - protein, 16 aa, synthetic construct
ASSWGDDTFYADSVKG

SEQ ID NO: 1635 - protein, 18 aa, synthetic construct
APTSFATTAYSSSNSYAY

SEQ ID NO: 1636 - protein, 5 aa, synthetic construct
RLAMG

SEQ ID NO: 1637 - protein, 16 aa, synthetic construct
ASSWGDDTFYADSVKG

SEQ ID NO: 1638 - protein, 18 aa, synthetic construct
APTSFATTAYSSSNSYAY

SEQ ID NO: 1639 - protein, 5 aa, synthetic construct
SGIMG

SEQ ID NO: 1640 - protein, 17 aa, synthetic construct
RIILNNNSTRYTDSVKG

SEQ ID NO: 1641 - protein, 17 aa, synthetic construct
RDRYGSGNSLSPSAYDY

SEQ ID NO: 1642 - protein, 5 aa, synthetic construct
RLAMG

SEQ ID NO: 1643 - protein, 16 aa, synthetic construct
ASSWGDDTFYADSVKG

SEQ ID NO: 1644 - protein, 18 aa, synthetic construct
APTSFATTAYSSSNSYAY

SEQ ID NO: 1645 - protein, 5 aa, synthetic construct
RLAMG

SEQ ID NO: 1646 - protein, 16 aa, synthetic construct
ASSWGDDTFYADSVKG

SEQ ID NO: 1647 - protein, 18 aa, synthetic construct
APTSFATTAYSSSNSYAY

SEQ ID NO: 1648 - protein, 5 aa, synthetic construct
RYAMG

SEQ ID NO: 1649 - protein, 16 aa, synthetic construct
ANSWGGDTYYADSVQG

SEQ ID NO: 1650 - protein, 18 aa, synthetic construct
APTSFATTAYSSSNSYAY

SEQ ID NO: 1651 - protein, 5 aa, synthetic construct
RLAMG

SEQ ID NO: 1652 - protein, 16 aa, synthetic construct
ASSWGDDTFYADSVKG

SEQ ID NO: 1653 - protein, 18 aa, synthetic construct
APTSFATTAYSSSNSYAY

SEQ ID NO: 1654 - protein, 5 aa, synthetic construct
RYAMG

SEQ ID NO: 1655 - protein, 16 aa, synthetic construct
IDSWGGDTFYADSVEG

SEQ ID NO: 1656 - protein, 18 aa, synthetic construct
APTSFATTAYSSSNSYRY

SEQ ID NO: 1657 - protein, 5 aa, synthetic construct
RLAMG

SEQ ID NO: 1658 - protein, 16 aa, synthetic construct
ASSWGDDTFYADSVKG

SEQ ID NO: 1659 - protein, 18 aa, synthetic construct
APTSFATTAYSSSNSYAY

SEQ ID NO: 1660 - protein, 5 aa, synthetic construct
RYAMG

SEQ ID NO: 1661 - protein, 16 aa, synthetic construct
ANSWGGDTYYADSVQG

SEQ ID NO: 1662 - protein, 18 aa, synthetic construct
APTSFATTAYSSSNSYAY

SEQ ID NO: 1663 - protein, 5 aa, synthetic construct
RYAMG

SEQ ID NO: 1664 - protein, 16 aa, synthetic construct
ANSWGGDTYYADSVQG

SEQ ID NO: 1665 - protein, 18 aa, synthetic construct
APTSFATTAYSSSNSYAY

SEQ ID NO: 1666 - protein, 5 aa, synthetic construct
RYAMG

SEQ ID NO: 1667 - protein, 16 aa, synthetic construct
ANSWGGDTYYADSVQG

SEQ ID NO: 1668 - protein, 18 aa, synthetic construct
APTSFATTAYSSSNSYAY

SEQ ID NO: 1669 - protein, 5 aa, synthetic construct
RYAMG

SEQ ID NO: 1670 - protein, 16 aa, synthetic construct
ANSWGGDTYYADSVQG

SEQ ID NO: 1671 - protein, 18 aa, synthetic construct
APTSFATTAYSSSNSYAY

SEQ ID NO: 1672 - protein, 5 aa, synthetic construct
RYAMG

SEQ ID NO: 1673 - protein, 16 aa, synthetic construct
ANSWGGDTYYADSVQG

SEQ ID NO: 1674 - protein, 18 aa, synthetic construct
APTSFATTAYSSSNSYAY

SEQ ID NO: 1675 - protein, 5 aa, synthetic construct
RYAMG

SEQ ID NO: 1676 - protein, 16 aa, synthetic construct
ADSWGGDTYYDDSVEG

SEQ ID NO: 1677 - protein, 18 aa, synthetic construct
APTSFATTAYSSSNSYAY

SEQ ID NO: 1678 - protein, 5 aa, synthetic construct
RYAMG

SEQ ID NO: 1679 - protein, 16 aa, synthetic construct
ANSWGGDTYYADSVQG

SEQ ID NO: 1680 - protein, 18 aa, synthetic construct
APTSFATTAYSSSNSYAY

SEQ ID NO: 1681 - protein, 5 aa, synthetic construct
RYAMG

SEQ ID NO: 1682 - protein, 16 aa, synthetic construct
ANSWGGDTYYADSVQG

SEQ ID NO: 1683 - protein, 18 aa, synthetic construct
APTSFATTAYSSSNSYAY

SEQ ID NO: 1684 - protein, 5 aa, synthetic construct
RYAMG

SEQ ID NO: 1685 - protein, 16 aa, synthetic construct
ADSWGGDTYYDDSVEG

SEQ ID NO: 1686 - protein, 18 aa, synthetic construct
APTSFATTAYSSSNSYAY

SEQ ID NO: 1687 - protein, 5 aa, synthetic construct
RYAMG

SEQ ID NO: 1688 - protein, 16 aa, synthetic construct
ANSWGGDTYYADSVQG

SEQ ID NO: 1689 - protein, 18 aa, synthetic construct
APTSFATTAYSSSNSYAY

SEQ ID NO: 1690 - protein, 5 aa, synthetic construct
RYAMG

SEQ ID NO: 1691 - protein, 16 aa, synthetic construct
ANSWGGDTYYADSVQG

SEQ ID NO: 1692 - protein, 18 aa, synthetic construct
APTSFATTAYSSSNSYAY

SEQ ID NO: 1693 - protein, 5 aa, synthetic construct
RYAMG

SEQ ID NO: 1694 - protein, 16 aa, synthetic construct
ANSWGGDTYYADSVQG

SEQ ID NO: 1695 - protein, 18 aa, synthetic construct
APTSFATTAYSSSNSYAY

SEQ ID NO: 1696 - protein, 5 aa, synthetic construct
RYAMG

SEQ ID NO: 1697 - protein, 16 aa, synthetic construct
AMSWGGDTFYADSVEG

SEQ ID NO: 1698 - protein, 18 aa, synthetic construct
APTSFATTAYSSSNSYAY

SEQ ID NO: 1699 - protein, 5 aa, synthetic construct
RYAMG

SEQ ID NO: 1700 - protein, 16 aa, synthetic construct
ANSWGGDTYYADSVQG

SEQ ID NO: 1701 - protein, 18 aa, synthetic construct
APTSFATTAYSSSNSYAY

SEQ ID NO: 1702 - protein, 5 aa, synthetic construct
RYAMG

SEQ ID NO: 1703 - protein, 16 aa, synthetic construct
ANSWGGDTYYADSVQG

SEQ ID NO: 1704 - protein, 18 aa, synthetic construct
APTSFATTAYSSSNSYAY

SEQ ID NO: 1705 - protein, 5 aa, synthetic construct
RLAMG

SEQ ID NO: 1706 - protein, 16 aa, synthetic construct
ASSWGDDTFYADSVKG

SEQ ID NO: 1707 - protein, 18 aa, synthetic construct
APTSFATTAYSSSNSYAY

SEQ ID NO: 1708 - protein, 5 aa, synthetic construct
RNAMG

SEQ ID NO: 1709 - protein, 16 aa, synthetic construct
ADSWGGDTFYADSVEG

SEQ ID NO: 1710 - protein, 18 aa, synthetic construct
APTSFATTAYSSSNSYRY

SEQ ID NO: 1711 - protein, 5 aa, synthetic construct
RYAMG

SEQ ID NO: 1712 - protein, 16 aa, synthetic construct
ANSWGGDTYYADSVQG

SEQ ID NO: 1713 - protein, 18 aa, synthetic construct
APTSFATTAYSSSNSYAY

SEQ ID NO: 1714 - protein, 5 aa, synthetic construct
RYAMG

SEQ ID NO: 1715 - protein, 16 aa, synthetic construct
ANSWGGDTYYADSVQG

SEQ ID NO: 1716 - protein, 18 aa, synthetic construct
APTSFATTAYSSSNSYAY

SEQ ID NO: 1717 - protein, 5 aa, synthetic construct
RYAMG

SEQ ID NO: 1718 - protein, 16 aa, synthetic construct
ADSWGGDTYYADSVEG

SEQ ID NO: 1719 - protein, 18 aa, synthetic construct
APTSFATTAYSSSNSYAY

SEQ ID NO: 1720 - protein, 5 aa, synthetic construct
RYAMG

SEQ ID NO: 1721 - protein, 16 aa, synthetic construct
ANSWGGDTYYTDSVEG

SEQ ID NO: 1722 - protein, 18 aa, synthetic construct
APTSFATTAYSSSNSYSY

SEQ ID NO: 1723 - protein, 5 aa, synthetic construct
RYAMG

SEQ ID NO: 1724 - protein, 16 aa, synthetic construct
ANSWGGDTYYADSVQG

SEQ ID NO: 1725 - protein, 18 aa, synthetic construct
APTSFATTAYSSSNSYAY

SEQ ID NO: 1726 - protein, 5 aa, synthetic construct
RYAMG

SEQ ID NO: 1727 - protein, 16 aa, synthetic construct
ANSWGGDTYYADSVQG

SEQ ID NO: 1728 - protein, 18 aa, synthetic construct
APTSFATTAYSSSNSYAY

SEQ ID NO: 1729 - protein, 5 aa, synthetic construct
RYAMG

SEQ ID NO: 1730 - protein, 16 aa, synthetic construct
ANSWGGDTYYADSVQG

SEQ ID NO: 1731 - protein, 18 aa, synthetic construct
APTSFATTAYSSSNSYAY

SEQ ID NO: 1732 - protein, 5 aa, synthetic construct
RYAMG

SEQ ID NO: 1733 - protein, 16 aa, synthetic construct
ANSWGGDTYYADSVQG

SEQ ID NO: 1734 - protein, 18 aa, synthetic construct
APTSFATTAYSSSNSYAY

SEQ ID NO: 1735 - protein, 5 aa, synthetic construct
RYAMG

SEQ ID NO: 1736 - protein, 16 aa, synthetic construct
ANSWGGDTYYADSVQG

SEQ ID NO: 1737 - protein, 18 aa, synthetic construct
APTSFATTAYSSSNSYAY

SEQ ID NO: 1738 - protein, 5 aa, synthetic construct
RLAMG

SEQ ID NO: 1739 - protein, 16 aa, synthetic construct
ASSWGDDTFYADSVKG

SEQ ID NO: 1740 - protein, 18 aa, synthetic construct
APTSFATTAYSSSNSYAY

SEQ ID NO: 1741 - protein, 5 aa, synthetic construct
RYAMG

SEQ ID NO: 1742 - protein, 16 aa, synthetic construct
ANSWGGDTYYADSVQG

SEQ ID NO: 1743 - protein, 18 aa, synthetic construct
APTSFATTAYSSSNSYAY

SEQ ID NO: 1744 - protein, 5 aa, synthetic construct
RYAMG

SEQ ID NO: 1745 - protein, 16 aa, synthetic construct
AISWGGDSFYTDSVEG

SEQ ID NO: 1746 - protein, 18 aa, synthetic construct
APTSFPTTAYSSSNSYSY

SEQ ID NO: 1747 - protein, 5 aa, synthetic construct
RYAMG

SEQ ID NO: 1748 - protein, 16 aa, synthetic construct
ANSWGGDTYYADSVQG

SEQ ID NO: 1749 - protein, 18 aa, synthetic construct
APTSFATTAYSSSNSYAY

SEQ ID NO: 1750 - protein, 5 aa, synthetic construct
RYAMG

SEQ ID NO: 1751 - protein, 16 aa, synthetic construct
ASSWGGDTFYADSVEG

SEQ ID NO: 1752 - protein, 18 aa, synthetic construct
APTSFPTTAYSSSNSYAY

SEQ ID NO: 1753 - protein, 5 aa, synthetic construct
RYAMG

SEQ ID NO: 1754 - protein, 16 aa, synthetic construct
ANSWGGDTYYADSVQG

SEQ ID NO: 1755 - protein, 18 aa, synthetic construct
APTSFATTAYSSSNSYAY

SEQ ID NO: 1756 - protein, 5 aa, synthetic construct
RYAMG

SEQ ID NO: 1757 - protein, 16 aa, synthetic construct
ANSWGGDTYYADSVQG

SEQ ID NO: 1758 - protein, 18 aa, synthetic construct
APTSFATTAYSSSNSYAY

SEQ ID NO: 1759 - protein, 5 aa, synthetic construct
RYAMG

SEQ ID NO: 1760 - protein, 16 aa, synthetic construct
ATSWGGDSYYADSVEG

SEQ ID NO: 1761 - protein, 18 aa, synthetic construct
APTSFATTAYSSSNSYAN

SEQ ID NO: 1762 - protein, 5 aa, synthetic construct
RYAMG

SEQ ID NO: 1763 - protein, 16 aa, synthetic construct
ANSWGGDTYYADSVQG

SEQ ID NO: 1764 - protein, 18 aa, synthetic construct
APTSFATTAYSSSNSYAY

SEQ ID NO: 1765 - protein, 5 aa, synthetic construct
RYAMG

SEQ ID NO: 1766 - protein, 16 aa, synthetic construct
ANSWGGDTYYADSVQG

SEQ ID NO: 1767 - protein, 18 aa, synthetic construct
APTSFATTAYSSSNSYAY

SEQ ID NO: 1768 - protein, 5 aa, synthetic construct
RYAMG

SEQ ID NO: 1769 - protein, 16 aa, synthetic construct
ANSWGGDTYYADSVQG

SEQ ID NO: 1770 - protein, 18 aa, synthetic construct
APTSFATTAYSSSNSYAY

SEQ ID NO: 1771 - protein, 5 aa, synthetic construct
RYAMG

SEQ ID NO: 1772 - protein, 16 aa, synthetic construct
ANSWGGDTYYADSVQG

SEQ ID NO: 1773 - protein, 18 aa, synthetic construct
APTSFATTAYSSSNSYAY

SEQ ID NO: 1774 - protein, 5 aa, synthetic construct
RYAMG

SEQ ID NO: 1775 - protein, 16 aa, synthetic construct
ADSWGGDTYYDDSVEG

SEQ ID NO: 1776 - protein, 18 aa, synthetic construct
APTSFATTAYSSSNSYAY

SEQ ID NO: 1777 - protein, 5 aa, synthetic construct
RDAMG

SEQ ID NO: 1778 - protein, 16 aa, synthetic construct
ADSWGGDTFYADSVEG

SEQ ID NO: 1779 - protein, 18 aa, synthetic construct
APTSFATTAYSSSNSYRY

SEQ ID NO: 1780 - protein, 5 aa, synthetic construct
RYAMG

SEQ ID NO: 1781 - protein, 16 aa, synthetic construct
ANSWGGDTYYADSVQG

SEQ ID NO: 1782 - protein, 18 aa, synthetic construct
APTSFATTAYSSSNSYAY

SEQ ID NO: 1783 - protein, 5 aa, synthetic construct
RYAMG

SEQ ID NO: 1784 - protein, 16 aa, synthetic construct
ANSWGGDTYYADSVQG

SEQ ID NO: 1785 - protein, 18 aa, synthetic construct
APTSFATTAYSSSNSYAY

SEQ ID NO: 1786 - protein, 5 aa, synthetic construct
RLAMG

SEQ ID NO: 1787 - protein, 16 aa, synthetic construct
ASSWGDDTFYADSVKG

SEQ ID NO: 1788 - protein, 18 aa, synthetic construct
APTSFATTAYSSSNSYAY

SEQ ID NO: 1789 - protein, 5 aa, synthetic construct
RLAMG

SEQ ID NO: 1790 - protein, 16 aa, synthetic construct
ASSWGDDTFYADSVKG

SEQ ID NO: 1791 - protein, 18 aa, synthetic construct
APTSFATTAYSSSNSYAY

SEQ ID NO: 1792 - protein, 5 aa, synthetic construct
RYAMG

SEQ ID NO: 1793 - protein, 16 aa, synthetic construct
IDSWGGDTFYADSVEG

SEQ ID NO: 1794 - protein, 18 aa, synthetic construct
APTSFATTAYSSSNSYRY

SEQ ID NO: 1795 - protein, 5 aa, synthetic construct
RYAMG

SEQ ID NO: 1796 - protein, 16 aa, synthetic construct
ANSWGGDTYYADSVQG

SEQ ID NO: 1797 - protein, 18 aa, synthetic construct
APTSFATTAYSSSNSYAY

SEQ ID NO: 1798 - protein, 5 aa, synthetic construct
RYAMG

SEQ ID NO: 1799 - protein, 16 aa, synthetic construct
ANSWGGDTYYADSVQG

SEQ ID NO: 1800 - protein, 18 aa, synthetic construct
APTSFATTAYSSSNSYAY

SEQ ID NO: 1801 - protein, 5 aa, synthetic construct
RVAMG

SEQ ID NO: 1802 - protein, 16 aa, synthetic construct
ADSWGGDTFYADSVEG

SEQ ID NO: 1803 - protein, 18 aa, synthetic construct
APASFATTAYSSSNSYSY

SEQ ID NO: 1804 - protein, 5 aa, synthetic construct
RYAMG

SEQ ID NO: 1805 - protein, 16 aa, synthetic construct
ANSWGGDTYYTDSVEG

SEQ ID NO: 1806 - protein, 18 aa, synthetic construct
APTSFATTAYSSSNSYTY

SEQ ID NO: 1807 - protein, 5 aa, synthetic construct
RYAMG

SEQ ID NO: 1808 - protein, 16 aa, synthetic construct
ASSWGGDTFYADSVEG

SEQ ID NO: 1809 - protein, 18 aa, synthetic construct
APTSFPTTAYSSSNSYAY

SEQ ID NO: 1810 - protein, 5 aa, synthetic construct
RYAMG

SEQ ID NO: 1811 - protein, 16 aa, synthetic construct
ADSWGGDTFYADSVEG

SEQ ID NO: 1812 - protein, 18 aa, synthetic construct
APTSFATTAYSSSNSYRY

SEQ ID NO: 1813 - protein, 5 aa, synthetic construct
RDAMG

SEQ ID NO: 1814 - protein, 16 aa, synthetic construct
VMSWGGDTFYTDSVEG

SEQ ID NO: 1815 - protein, 18 aa, synthetic construct
APTSFATTAYSSSNSYSY

SEQ ID NO: 1816 - protein, 5 aa, synthetic construct
RYAMG

SEQ ID NO: 1817 - protein, 16 aa, synthetic construct
ADSWGGDTYYDDSVEG

SEQ ID NO: 1818 - protein, 18 aa, synthetic construct
APTSFATTAYSSSNSYAY

SEQ ID NO: 1819 - protein, 5 aa, synthetic construct
RYAMG

SEQ ID NO: 1820 - protein, 16 aa, synthetic construct
ANSWGGDTYYADSVQG

SEQ ID NO: 1821 - protein, 18 aa, synthetic construct
APTSFATTAYSSSNSYAY

SEQ ID NO: 1822 - protein, 5 aa, synthetic construct
RYAMG

SEQ ID NO: 1823 - protein, 16 aa, synthetic construct
CDSWGGDTFYADSVEG

SEQ ID NO: 1824 - protein, 18 aa, synthetic construct
APTSFATTAYSSSNSYTV

SEQ ID NO: 1825 - protein, 5 aa, synthetic construct
RYAMG

SEQ ID NO: 1826 - protein, 16 aa, synthetic construct
IDSWGGDTFYADSVEG

SEQ ID NO: 1827 - protein, 18 aa, synthetic construct
APTSFATTAYSSSNSYRY

SEQ ID NO: 1828 - protein, 5 aa, synthetic construct
RLAMG

SEQ ID NO: 1829 - protein, 16 aa, synthetic construct
ASSWGDDTFYADSVKG

SEQ ID NO: 1830 - protein, 18 aa, synthetic construct
APTSFATTAYSSSNSYAY

SEQ ID NO: 1831 - protein, 5 aa, synthetic construct
RLAMG

SEQ ID NO: 1832 - protein, 16 aa, synthetic construct
ASSWGDDTFYADSVEG

SEQ ID NO: 1833 - protein, 18 aa, synthetic construct
APTSFATTAYSSSNSYAY

SEQ ID NO: 1834 - protein, 5 aa, synthetic construct
RYAMG

SEQ ID NO: 1835 - protein, 16 aa, synthetic construct
ASSWGGDTYYADSVEG

SEQ ID NO: 1836 - protein, 18 aa, synthetic construct
APTSFATTAYSSSNSYAY

SEQ ID NO: 1837 - protein, 5 aa, synthetic construct
RYAMG

SEQ ID NO: 1838 - protein, 16 aa, synthetic construct
ANSWGGDTYYADSVQG

SEQ ID NO: 1839 - protein, 18 aa, synthetic construct
APTSFATTAYSSSNSYAY

SEQ ID NO: 1840 - protein, 5 aa, synthetic construct
RLAMG

SEQ ID NO: 1841 - protein, 16 aa, synthetic construct
VNSWGGDTFYADSVEG

SEQ ID NO: 1842 - protein, 18 aa, synthetic construct
APTSFATTAYSSSNSYAY

SEQ ID NO: 1843 - protein, 5 aa, synthetic construct
RYAMG

SEQ ID NO: 1844 - protein, 16 aa, synthetic construct
ANSWGGDTYYADSVQG

SEQ ID NO: 1845 - protein, 18 aa, synthetic construct
APTSFATTAYSSSNSYAY

SEQ ID NO: 1846 - protein, 5 aa, synthetic construct
RYAMG

SEQ ID NO: 1847 - protein, 16 aa, synthetic construct
ASSWGGDTFYADSVEG

SEQ ID NO: 1848 - protein, 18 aa, synthetic construct
APTSFATTAYSSSNSYGS

SEQ ID NO: 1849 - protein, 5 aa, synthetic construct
RYAMG

SEQ ID NO: 1850 - protein, 16 aa, synthetic construct
ASSWGGDTFYADSVEG

SEQ ID NO: 1851 - protein, 18 aa, synthetic construct
APTSFPTTAYSSSNSYAY

SEQ ID NO: 1852 - protein, 5 aa, synthetic construct
RYAMG

SEQ ID NO: 1853 - protein, 16 aa, synthetic construct
IDSWGGDTFYADSVEG

SEQ ID NO: 1854 - protein, 18 aa, synthetic construct
APTSFATTAYSSSNSYRY

SEQ ID NO: 1855 - protein, 5 aa, synthetic construct
RDAMG

SEQ ID NO: 1856 - protein, 16 aa, synthetic construct
VMSWGGDTFYTDSVEG

SEQ ID NO: 1857 - protein, 18 aa, synthetic construct
APTSFATTAYSSSNSYSY

SEQ ID NO: 1858 - protein, 5 aa, synthetic construct
RLAMG

SEQ ID NO: 1859 - protein, 16 aa, synthetic construct
ASSWGDDTFYADSVKG

SEQ ID NO: 1860 - protein, 18 aa, synthetic construct
APTSFATTAYSSSNSYAY

SEQ ID NO: 1861 - protein, 5 aa, synthetic construct
RYAMG

SEQ ID NO: 1862 - protein, 16 aa, synthetic construct
ANSWGGDTYYTDSVEG

SEQ ID NO: 1863 - protein, 18 aa, synthetic construct
APTSFATTAYSSSNSYTY

SEQ ID NO: 1864 - protein, 5 aa, synthetic construct
RCAMG

SEQ ID NO: 1865 - protein, 16 aa, synthetic construct
ISSWGGDTFYEDSVEG

SEQ ID NO: 1866 - protein, 18 aa, synthetic construct
APTSFATTAYSSSNSYAY

SEQ ID NO: 1867 - skipped

SEQ ID NO: 1868 - protein, 30 aa, synthetic construct
EVQLVESGGGLVQAGGSLRLSCAASGRTFR

SEQ ID NO: 1869 - protein, 14 aa, synthetic construct
WFRRAPGKEREFVA

SEQ ID NO: 1870 - protein, 32 aa, synthetic construct
RFTISRDNGRNMVYLQMNSLKPEDTAVYYCAA

SEQ ID NO: 1871 - protein, 11 aa, synthetic construct
WGQGTQVTVSS

SEQ ID NO: 1872 - protein, 30 aa, synthetic construct
QVQLVESGGGLVQPGGSLRLSCATSGFTFR

SEQ ID NO: 1873 - protein, 14 aa, synthetic construct
WVRQAPGKGLEWVS

SEQ ID NO: 1874 - protein, 32 aa, synthetic construct
RFTISRDNAKNTLYLQMNNLKPEDTAVYYCAK

SEQ ID NO: 1875 - protein, 11 aa, synthetic construct
RGQGTQVTVSS

SEQ ID NO: 1876 - protein, 30 aa, synthetic construct
QVQLVESGGGLVQAGGSLRLSCTASGRTLS

SEQ ID NO: 1877 - protein, 14 aa, synthetic construct
WFRQAADKGREFVT

SEQ ID NO: 1878 - protein, 32 aa, synthetic construct
RFTISRDNAKNTVYLQMNSLQPEDTALYFCAG

SEQ ID NO: 1879 - protein, 11 aa, synthetic construct
WGQGTLVTVSS

SEQ ID NO: 1880 - protein, 30 aa, synthetic construct
QVQLVESGGGLVQAGGSLRLSCAASGGTFR

SEQ ID NO: 1881 - protein, 14 aa, synthetic construct
WFRRAPGKEREFVA

SEQ ID NO: 1882 - protein, 32 aa, synthetic construct; identical to SEQ ID NO: 1870

SEQ ID NO: 1883 - protein, 11 aa, synthetic construct
WGQGTQVTVSS

SEQ ID NO: 1884 - protein, 30 aa, synthetic construct
EVQLVESGGGLVQAGGSLRLSCAASIRAFT

SEQ ID NO: 1885 - protein, 14 aa, synthetic construct
WFRQAPGKEREYVA

SEQ ID NO: 1886 - protein, 32 aa, synthetic construct
RFTISRDNAKKTMYLEMNNLKPEDTALYYCAA

SEQ ID NO: 1887 - protein, 11 aa, synthetic construct
WGQGTQVTVSS

SEQ ID NO: 1888 - protein, 30 aa, synthetic construct
QVQLQESGGGLVQAGGSLRLSCAASGRTFS

SEQ ID NO: 1889 - protein, 14 aa, synthetic construct
WFRQAPGKEREFVA

SEQ ID NO: 1890 - protein, 32 aa, synthetic construct
RFTISRDNDKNMVYLQMNSLKPEDTAVYYCAA

SEQ ID NO: 1891 - protein, 11 aa, synthetic construct
WGQGTQVTVSS

SEQ ID NO: 1892 - protein, 30 aa, synthetic construct
EVQLVESGGGLVQAGGSLRLSCAASGRAFS

SEQ ID NO: 1893 - protein, 14 aa, synthetic construct
WFRQAPGKEREFVA

SEQ ID NO: 1894 - protein, 32 aa, synthetic construct
RFTISRDNTQNTVYLQMNSLKPEDTATYYCAA

SEQ ID NO: 1895 - protein, 11 aa, synthetic construct
WGQGTQVTVSS

SEQ ID NO: 1896 - protein, 30 aa, synthetic construct
QVQLVESGGGLVQPGGSLRLSCATSGFTFS

SEQ ID NO: 1897 - protein, 14 aa, synthetic construct
WVRQAPGKGLEFVS

SEQ ID NO: 1898 - protein, 32 aa, synthetic construct
RFTISRDNAKNTLYLQMNNLKPEDTAIYYCAK

SEQ ID NO: 1899 - protein, 11 aa, synthetic construct
RGQGTQVTVSS

SEQ ID NO: 1900 - protein, 30 aa, synthetic construct
EVQLVESGGGLVQAGGSLRLSCAASGGSIY

SEQ ID NO: 1901 - protein, 14 aa, synthetic construct
WFRQAPGKEREFVA

SEQ ID NO: 1902 - protein, 32 aa, synthetic construct
RFTLSRENAKNTLYLQMNSLKPEDTATYYCAI

SEQ ID NO: 1903 - protein, 11 aa, synthetic construct
WGKGTLVTVSS

SEQ ID NO: 1904 - protein, 30 aa, synthetic construct
QVQLVESGGGLVQAGGSLRLSCAASGIPFD

SEQ ID NO: 1905 - protein, 14 aa, synthetic construct
WFRQAPGKEREFVA

SEQ ID NO: 1906 - protein, 32 aa, synthetic construct
RFTISRGNAKNTVFLQMNSLKPEDTAVYYCAA

SEQ ID NO: 1907 - protein, 11 aa, synthetic construct
WGQGTQVTVSS

SEQ ID NO: 1908 - protein, 30 aa, synthetic construct
QLQLVESGGGLVQAGGSLRLSCAASGLTFE

SEQ ID NO: 1909 - protein, 14 aa, synthetic construct
WFRQAPGKEREGVS

SEQ ID NO: 1910 - protein, 32 aa, synthetic construct
RFTISSDNAKSTVYLQMNTLKPEDTAVYYCAV

SEQ ID NO: 1911 - protein, 11 aa, synthetic construct
WGKGTQVTVSS

SEQ ID NO: 1912 - protein, 30 aa, synthetic construct
QVQLVESGGGLVQAGGSLRLSCAASGFTFD

SEQ ID NO: 1913 - protein, 14 aa, synthetic construct
WFRQAPGKEREGVS

SEQ ID NO: 1914 - protein, 32 aa, synthetic construct
RFTISSNNAKNTVYLHMNSLKPDDAAVYYCAI

SEQ ID NO: 1915 - protein, 11 aa, synthetic construct
WGKGTLVTVSS

SEQ ID NO: 1916 - protein, 30 aa, synthetic construct
QVQLQESGGGLVQAGDSLRLSCAASGFNFG

SEQ ID NO: 1917 - protein, 14 aa, synthetic construct
WFRQAPGKEREFVA

SEQ ID NO: 1918 - protein, 32 aa, synthetic construct
RFTISKDNAKDTLFLQMNSLRPDDTGVYYCAK

SEQ ID NO: 1919 - protein, 11 aa, synthetic construct
WGQGTQVTVSS

SEQ ID NO: 1920 - protein, 30 aa, synthetic construct
EVQLVESGGGLVQTGGSLRLSCAASGSQFI

SEQ ID NO: 1921 - protein, 14 aa, synthetic construct
WYRQVPGKQRELVA

SEQ ID NO: 1922 - protein, 32 aa, synthetic construct
RFTILRDSVKNTAYLQMSNLKPEDTGVYYCKA

SEQ ID NO: 1923 - protein, 11 aa, synthetic construct
WGQGTQVTVSS

SEQ ID NO: 1924 - protein, 30 aa, synthetic construct
QVQLVESGGGSVQPGGSLRLSCAASGFTFS

SEQ ID NO: 1925 - protein, 14 aa, synthetic construct
WVRQAPGKGLEWVA

SEQ ID NO: 1926 - protein, 32 aa, synthetic construct
RFTISRDNAEDTLYLQMNSLKPEDTAVYYCAK

SEQ ID NO: 1927 - protein, 11 aa, synthetic construct
RGQGTQVTVSS

SEQ ID NO: 1928 - protein, 30 aa, synthetic construct
EVQLVESGGGLVQAGGSLRLSCAASGRAIE

SEQ ID NO: 1929 - protein, 14 aa, synthetic construct
WFRQAPGKEREFVA

SEQ ID NO: 1930 - protein, 32 aa, synthetic construct
RFTISRDNAKNTVYLQMSSLKPEDTALYYCAA

SEQ ID NO: 1931 - protein, 11 aa, synthetic construct
WGQGTQVTVSS

SEQ ID NO: 1932 - protein, 30 aa, synthetic construct
QVQLQESGGGLVQAGGSLRLSCVASGSVSS

SEQ ID NO: 1933 - protein, 14 aa, synthetic construct
WYRQGADNQRVLVA

SEQ ID NO: 1934 - protein, 32 aa, synthetic construct
RFTISRQNARNTVYLQMNSLKPEDTAVYYCNA

SEQ ID NO: 1935 - protein, 11 aa, synthetic construct
WGQGTQVTVSS

SEQ ID NO: 1936 - protein, 30 aa, synthetic construct
QVQLVESGGGLVQPGGSLRLSCAISGGTLD

SEQ ID NO: 1937 - protein, 14 aa, synthetic construct
WVRQAPGKQREGVS

SEQ ID NO: 1938 - protein, 32 aa, synthetic construct
RFTISKDSAKNTVYLQMTSLKPEDTAVYYCAA

SEQ ID NO: 1939 - protein, 11 aa, synthetic construct
WGLGTQVTVSS

SEQ ID NO: 1940 - protein, 30 aa, synthetic construct
EVQLVESGGGLVQTGGSLRLSCAASGGTFS

SEQ ID NO: 1941 - protein, 14 aa, synthetic construct
WFRQVPGKEREFVA

SEQ ID NO: 1942 - protein, 32 aa, synthetic construct
RFAISRDNGKNTVYLQMNRLKPADTAIYYCAA

SEQ ID NO: 1943 - protein, 11 aa, synthetic construct
WGQGTQVTVSS

SEQ ID NO: 1944 - protein, 30 aa, synthetic construct
EVQLVESGGGLVQAGGSLRLSCAASGRDFS

SEQ ID NO: 1945 - protein, 14 aa, synthetic construct
WFRQAPGKEREFVV

SEQ ID NO: 1946 - protein, 32 aa, synthetic construct
RFTISRDNAKNTVYLDMNSLKPEDTAVYYCAS

SEQ ID NO: 1947 - protein, 11 aa, synthetic construct
WGEGTLVTVSS

SEQ ID NO: 1948 - protein, 30 aa, synthetic construct
EVQLVESGGGLVQAGGSLRLSCAASGRTFS

SEQ ID NO: 1949 - protein, 14 aa, synthetic construct
WFRQAPGKEREFVA

SEQ ID NO: 1950 - protein, 32 aa, synthetic construct
RFTISRDNAKNTVYLQMNSLEPEDTAVYYCAA

SEQ ID NO: 1951 - protein, 11 aa, synthetic construct
WGQGTQVTVSS

SEQ ID NO: 1952 - protein, 30 aa, synthetic construct
EVQLVESGGGLVQAGGSLRLSCAASGSIFS

SEQ ID NO: 1953 - protein, 14 aa, synthetic construct
WFRQVPGMERELVA

SEQ ID NO: 1954 - protein, 32 aa, synthetic construct
RFTISRDNSKNTVYLQMNTLKPEDTAIYVCAA

SEQ ID NO: 1955 - protein, 11 aa, synthetic construct
WGQGTQVTVSS

SEQ ID NO: 1956 - protein, 30 aa, synthetic construct
QVQLVESGGGLVQAGGSLRLSCAVSGDVFV

SEQ ID NO: 1957 - protein, 14 aa, synthetic construct
WFRQAPGKEREFVA

SEQ ID NO: 1958 - protein, 32 aa, synthetic construct
RFTVSRDNAKNTVYLQMNNLKPEDTAVYYCAA

SEQ ID NO: 1959 - protein, 11 aa, synthetic construct
WGQGTQVTVSS

SEQ ID NO: 1960 - protein, 30 aa, synthetic construct
QVQLVESGGELVQGGASLRLSCAASGRTFS

SEQ ID NO: 1961 - protein, 14 aa, synthetic construct
WFRQAPEKEREFVA

SEQ ID NO: 1962 - protein, 32 aa, synthetic construct
RFTISRDNARKMVYLQMNSLKPEDTAVYYCAA

SEQ ID NO: 1963 - protein, 11 aa, synthetic construct
WGQGTQVTVSS

SEQ ID NO: 1964 - protein, 30 aa, synthetic construct
QVQLVESGGGLVQTGDSLRLSCAASGRSLD

SEQ ID NO: 1965 - protein, 14 aa, synthetic construct
WFRQAPGKERDFLA

SEQ ID NO: 1966 - protein, 32 aa, synthetic construct
RFTISRNIAKRTVDLEMNSLEPEDTAVYYCAA

SEQ ID NO: 1967 - protein, 11 aa, synthetic construct
WGQGTQVTVSS

SEQ ID NO: 1968 - protein, 30 aa, synthetic construct
QVQLQESGGGLVQAGGSLRLSCAASGDVFV

SEQ ID NO: 1969 - protein, 14 aa, synthetic construct
WFRQAPGKEREFVA

SEQ ID NO: 1970 - protein, 32 aa, synthetic construct
RFTVSRDNAKNTAYLQMNNLKPEDTAIYYCAA

SEQ ID NO: 1971 - protein, 11 aa, synthetic construct
WGQGTQVTVSS

SEQ ID NO: 1972 - protein, 30 aa, synthetic construct
QVQLVESGGGLVQAGGSLTLSCAAPGRTFG

SEQ ID NO: 1973 - protein, 14 aa, synthetic construct
WFRQAPGKEREFVA

SEQ ID NO: 1974 - protein, 32 aa, synthetic construct
RFTISRNNAWNTVNLQMNSLKVEDTAVYYCAA

SEQ ID NO: 1975 - protein, 11 aa, synthetic construct
WGQGTQVTVSS

SEQ ID NO: 1976 - protein, 30 aa, synthetic construct
QVQLVESGGGLVQAGGSLRLSCAASGRTLS

SEQ ID NO: 1977 - protein, 14 aa, synthetic construct
WFRQAPGKEREFVT

SEQ ID NO: 1978 - protein, 32 aa, synthetic construct
RFTFSRDNAKNTVYLQMNSLQPEDTAVYYCAA

SEQ ID NO: 1979 - protein, 11 aa, synthetic construct
WGQGTQVTVSS

SEQ ID NO: 1980 - protein, 30 aa, synthetic construct
QVQLVESGGGLVQAGGSLRLACVASGLTFD

SEQ ID NO: 1981 - protein, 14 aa, synthetic construct
WFRQAPGKEREFVA

SEQ ID NO: 1982 - protein, 32 aa, synthetic construct
RFTISRDNAKNTAYLRMNSLKPEDTAVYYCAA

SEQ ID NO: 1983 - protein, 11 aa, synthetic construct
WGQGTQVTVSS

SEQ ID NO: 1984 - protein, 30 aa, synthetic construct
EVQLVESGGGWVQDGGSLRLSCALSGRTFV

SEQ ID NO: 1985 - protein, 14 aa, synthetic construct
WFRQAPGKEREFVA

SEQ ID NO: 1986 - protein, 31 aa, synthetic construct
FTISRDSAKNTMYLQMDSLRPEDTAVYYCAA

SEQ ID NO: 1987 - protein, 11 aa, synthetic construct
WGQGTQVTVSS

SEQ ID NO: 1988 - protein, 30 aa, synthetic construct
QVQLVESGGGLVQAGGSLRLSCTGYGGAFT

SEQ ID NO: 1989 - protein, 14 aa, synthetic construct
WFRQAPGKEREFVA

SEQ ID NO: 1990 - protein, 32 aa, synthetic construct
RFTISRDNAKNTMYLQMNNLKPEDTAVYYCAA

SEQ ID NO: 1991 - protein, 11 aa, synthetic construct
WGQGTQVTVSS

SEQ ID NO: 1992 - protein, 30 aa, synthetic construct
QVQLVESGGGLVQAGGSLRLSCAASGRTFG

SEQ ID NO: 1993 - protein, 14 aa, synthetic construct
WFRQVPGKEREFVS

SEQ ID NO: 1994 - protein, 32 aa, synthetic construct
RFTISRDNAKNTVYLQMNSLTPEDTGVYYCAA

SEQ ID NO: 1995 - protein, 11 aa, synthetic construct
WGQGTQVTVSS

SEQ ID NO: 1996 - protein, 30 aa, synthetic construct
QLQLVESGGGLVQAGGSLRLSCAASGPTFS

SEQ ID NO: 1997 - protein, 14 aa, synthetic construct
WFRQAPGKEREFVA

SEQ ID NO: 1998 - protein, 32 aa, synthetic construct
RFTVSRDNAKNTVDLQMNSMKPEDTAVYYCAA

SEQ ID NO: 1999 - protein, 11 aa, synthetic construct
WGQGTQVTVSS

SEQ ID NO: 2000 - protein, 30 aa, synthetic construct
QVQLVESGGGLVQAGSSLRLSCAASGRTLS

SEQ ID NO: 2001 - protein, 14 aa, synthetic construct
WFRQAPGKEREFVA

SEQ ID NO: 2002 - protein, 32 aa, synthetic construct
RFTYSRDNAKSAVYLQMNSLQPEDTAVYYCAA

SEQ ID NO: 2003 - protein, 11 aa, synthetic construct
WGQGAQVTVSS

SEQ ID NO: 2004 - protein, 30 aa, synthetic construct
QVQLQESGGGLVQGGGSLRLSCAASGGIFS

SEQ ID NO: 2005 - protein, 14 aa, synthetic construct
WFRQAPGKEREFVA

SEQ ID NO: 2006 - protein, 32 aa, synthetic construct
RFTISRDNAKSTVYLQMNSLKPEETAVYYCAA

SEQ ID NO: 2007 - protein, 11 aa, synthetic construct
WGHGTQVTVSS

SEQ ID NO: 2008 - protein, 30 aa, synthetic construct; identical to SEQ ID NO: 1976

SEQ ID NO: 2009 - protein, 14 aa, synthetic construct
WFRQAPGSEREFVA

SEQ ID NO: 2010 - protein, 32 aa, synthetic construct
RFTFSRDNAKNAVYLQMNSLQPEDTAAYYCAA

SEQ ID NO: 2011 - protein, 11 aa, synthetic construct
WGQGTQVTVSS

SEQ ID NO: 2012 - protein, 30 aa, synthetic construct; identical to SEQ ID NO: 1976

SEQ ID NO: 2013 - protein, 14 aa, synthetic construct
WFRQAPGKEREYVA

SEQ ID NO: 2014 - protein, 32 aa, synthetic construct
RFTFSRDNAKNEVYLQMNSLQPEDTAVYYCAG

SEQ ID NO: 2015 - protein, 11 aa, synthetic construct
WGQGTQVTVSS

SEQ ID NO: 2016 - protein, 30 aa, synthetic construct
QVQLVESGGGLVQAGGSLRLSCAASGRSLS

SEQ ID NO: 2017 - protein, 14 aa, synthetic construct
WFRQAPGKEREFVA

SEQ ID NO: 2018 - protein, 32 aa, synthetic construct
RFTFSRDNAKNAVYLEMNDLQPEDTAVYYCAA

SEQ ID NO: 2019 - protein, 11 aa, synthetic construct
WGRGTQVTVSS

SEQ ID NO: 2020 - protein, 515 aa, synthetic construct
QVQLVESGGGLVQAGGSLRLSCAASGRTFGSTAVGWFRQVPGKEREFVSAINRSGSATTYADSVKGRFTISRDNAKNTVYLQMNSLTPEDTGVYYCAADSLPYGRPYYFQRSAGEYDYWGQGTQVTVSSGGGGSGGGGSGGGGSGSEVQLVESGGGLVQAGGSLRLSCAASGRAIENYPVGWFRQAPGKEREFVAAITWISGSTLYADSVKGRFTISRDNAKNTVYLQMSSLKPEDTALYYCAAALKTITRGQNDYSYWGQGTQVTVSSGGGGSGGGGSGGGGSTVSSDKTHTCPPCPAPEAAGGPSVFLFPPKPKDTLMISRTPEVTCVVVDVSHEDPEVKFNWYVDGVEVHNAKTKPREEQYNSTYRVVSVLTVLHQDWLNGKEYKCKVSNKALGAPIEKTISKAKGQPREPQVYTLPPSRDELTKNQVSLTCLVKGFYPSDIAVEWESNGQPENNYKTTPPVLDSDGSFLLYSKLTVDKSRWQQGNVFSCSVMHEALHNHYTQKSLSLSPGK

SEQ ID NO: 2021 - protein, 512 aa, synthetic construct
QVQLQESGGGLVQGGGSLRLSCAASGGIFSSYAMGWFRQAPGKEREFVAAISRSGRSTNYADSVKGRFTISRDNAKSTVYLQMNSLKPEETAVYYCAAGRYYNSAYDPSPGDFGSWGHGTQVTVSSGGGGSGGGGSGGGGSGSEVQLVESGGGLVQAGGSLRLSCAASGRAIENYPVGWFRQAPGKEREFVAAITWISGSTLYADSVKGRFTISRDNAKNTVYLQMSSLKPEDTALYYCAAALKTITRGQNDYSYWGQGTQVTVSSGGGGSGGGGSGGGGSTVSSDKTHTCPPCPAPEAAGGPSVFLFPPKPKDTLMISRTPEVTCVVVDVSHEDPEVKFNWYVDGVEVHNAKTKPREEQYNSTYRVVSVLTVLHQDWLNGKEYKCKVSNKALGAPIEKTISKAKGQPREPQVYTLPPSRDELTKNQVSLTCLVKGFYPSDIAVEWESNGQPENNYKTTPPVLDSDGSFLLYSKLTVDKSRWQQGNVFSCSVMHEALHNHYTQKSLSLSPGK

SEQ ID NO: 2022 - protein, 512 aa, synthetic construct
QVQLVESGGGLVQAGGSLRLSCAASGRTLSRYAMGWFRQAPGSEREFVAASSWGGDTFYADSVEGRFTFSRDNAKNAVYLQMNSLQPEDTAAYYCAAAPTSFPTTAYSSSNSYAYWGQGTQVTVSSGGGGSGGGGSGGGGSGSEVQLVESGGGLVQAGGSLRLSCAASGRAIENYPVGWFRQAPGKEREFVAAITWISGSTLYADSVKGRFTISRDNAKNTVYLQMSSLKPEDTALYYCAAALKTITRGQNDYSYWGQGTQVTVSSGGGGSGGGGSGGGGSTVSSDKTHTCPPCPAPEAAGGPSVFLFPPKPKDTLMISRTPEVTCVVVDVSHEDPEVKFNWYVDGVEVHNAKTKPREEQYNSTYRVVSVLTVLHQDWLNGKEYKCKVSNKALGAPIEKTISKAKGQPREPQVYTLPPSRDELTKNQVSLTCLVKGFYPSDIAVEWESNGQPENNYKTTPPVLDSDGSFLLYSKLTVDKSRWQQGNVFSCSVMHEALHNHYTQKSLSLSPGK

SEQ ID NO: 2023 - protein, 506 aa, synthetic construct
QVQLVESGGGLVQAGGSLTLSCAAPGRTFGTDVVGWFRQAPGKEREFVASISRSGDGIYYDDSVKGRFTISRNNAWNTVNLQMNSLKVEDTAVYYCAAGDGWSTYDYWGQGTQVTVSSGGGGSGGGGSGGGGSGSQVQLVESGGGLVQPGGSLRLSCAISGGTLDSYGIGWVRQAPGKQREGVSCMSRSDDRTYYADSVKGRFTISKDSAKNTVYLQMTSLKPEDTAVYYCAAVDAYGCSLVQPTTYDFWGLGTQVTVSSGGGGSGGGGSGGGGSTVSSDKTHTCPPCPAPEAAGGPSVFLFPPKPKDTLMISRTPEVTCVVVDVSHEDPEVKFNWYVDGVEVHNAKTKPREEQYNSTYRVVSVLTVLHQDWLNGKEYKCKVSNKALGAPIEKTISKAKGQPREPQVYTLPPSRDELTKNQVSLTCLVKGFYPSDIAVEWESNGQPENNYKTTPPVLDSDGSFLLYSKLTVDKSRWQQGNVFSCSVMHEALHNHYTQKSLSLSPGK

SEQ ID NO: 2024 - protein, 509 aa, synthetic construct
QVQLVESGGGLVQAGGSLRLSCTGYGGAFTGYALGWFRQAPGKEREFVARINWSGSFTYYASSVKGRFTISRDNAKNTMYLQMNNLKPEDTAVYYCAADNPSTLATDYDNWGQGTQVTVSSGGGGSGGGGSGGGGSGSQVQLVESGGGLVQPGGSLRLSCAISGGTLDSYGIGWVRQAPGKQREGVSCMSRSDDRTYYADSVKGRFTISKDSAKNTVYLQMTSLKPEDTAVYYCAAVDAYGCSLVQPTTYDFWGLGTQVTVSSGGGGSGGGGSGGGGSTVSSDKTHTCPPCPAPEAAGGPSVFLFPPKPKDTLMISRTPEVTCVVVDVSHEDPEVKFNWYVDGVEVHNAKTKPREEQYNSTYRVVSVLTVLHQDWLNGKEYKCKVSNKALGAPIEKTISKAKGQPREPQVYTLPPSRDELTKNQVSLTCLVKGFYPSDIAVEWESNGQPENNYKTTPPVLDSDGSFLLYSKLTVDKSRWQQGNVFSCSVMHEALHNHYTQKSLSLSPGK

SEQ ID NO: 2025 - protein, 517 aa, synthetic construct
QVQLVESGGGLVQAGGSLRLSCAASGRTFGSTAVGWFRQVPGKEREFVSAINRSGSATTYADSVKGRFTISRDNAKNTVYLQMNSLTPEDTGVYYCAADSLPYGRPYYFQRSAGEYDYWGQGTQVTVSSGGGGSGGGGSGGGGSGSQVQLVESGGGLVQPGGSLRLSCAISGGTLDSYGIGWVRQAPGKQREGVSCMSRSDDRTYYADSVKGRFTISKDSAKNTVYLQMTSLKPEDTAVYYCAAVDAYGCSLVQPTTYDFWGLGTQVTVSSGGGGSGGGGSGGGGSTVSSDKTHTCPPCPAPEAAGGPSVFLFPPKPKDTLMISRTPEVTCVVVDVSHEDPEVKFNWYVDGVEVHNAKTKPREEQYNSTYRVVSVLTVLHQDWLNGKEYKCKVSNKALGAPIEKTISKAKGQPREPQVYTLPPSRDELTKNQVSLTCLVKGFYPSDIAVEWESNGQPENNYKTTPPVLDSDGSFLLYSKLTVDKSRWQQGNVFSCSVMHEALHNHYTQKSLSLSPGK

SEQ ID NO: 2026 - protein, 514 aa, synthetic construct
QVQLQESGGGLVQGGGSLRLSCAASGGIFSSYAMGWFRQAPGKEREFVAAISRSGRSTNYADSVKGRFTISRDNAKSTVYLQMNSLKPEETAVYYCAAGRYYNSAYDPSPGDFGSWGHGTQVTVSSGGGGSGGGGSGGGGSGSQVQLVESGGGLVQPGGSLRLSCAISGGTLDSYGIGWVRQAPGKQREGVSCMSRSDDRTYYADSVKGRFTISKDSAKNTVYLQMTSLKPEDTAVYYCAAVDAYGCSLVQPTTYDFWGLGTQVTVSSGGGGSGGGGSGGGGSTVSSDKTHTCPPCPAPEAAGGPSVFLFPPKPKDTLMISRTPEVTCVVVDVSHEDPEVKFNWYVDGVEVHNAKTKPREEQYNSTYRVVSVLTVLHQDWLNGKEYKCKVSNKALGAPIEKTISKAKGQPREPQVYTLPPSRDELTKNQVSLTCLVKGFYPSDIAVEWESNGQPENNYKTTPPVLDSDGSFLLYSKLTVDKSRWQQGNVFSCSVMHEALHNHYTQKSLSLSPGK

SEQ ID NO: 2027 - protein, 514 aa, synthetic construct
QVQLVESGGGLVQAGGSLRLSCAASGRTLSRYAMGWFRQAPGSEREFVAASSWGGDTFYADSVEGRFTFSRDNAKNAVYLQMNSLQPEDTAAYYCAAAPTSFPTTAYSSSNSYAYWGQGTQVTVSSGGGGSGGGGSGGGGSGSQVQLVESGGGLVQPGGSLRLSCAISGGTLDSYGIGWVRQAPGKQREGVSCMSRSDDRTYYADSVKGRFTISKDSAKNTVYLQMTSLKPEDTAVYYCAAVDAYGCSLVQPTTYDFWGLGTQVTVSSGGGGSGGGGSGGGGSTVSSDKTHTCPPCPAPEAAGGPSVFLFPPKPKDTLMISRTPEVTCVVVDVSHEDPEVKFNWYVDGVEVHNAKTKPREEQYNSTYRVVSVLTVLHQDWLNGKEYKCKVSNKALGAPIEKTISKAKGQPREPQVYTLPPSRDELTKNQVSLTCLVKGFYPSDIAVEWESNGQPENNYKTTPPVLDSDGSFLLYSKLTVDKSRWQQGNVFSCSVMHEALHNHYTQKSLSLSPGK

SEQ ID NO: 2028 - protein, 508 aa, synthetic construct
QVQLVESGGGLVQAGGSLTLSCAAPGRTFGTDVVGWFRQAPGKEREFVASISRSGDGIYYDDSVKGRFTISRNNAWNTVNLQMNSLKVEDTAVYYCAAGDGWSTYDYWGQGTQVTVSSGGGGSGGGGSGGGGSGSEVQLVESGGGLVQTGGSLRLSCAASGGTFSRDAMAWFRQVPGKEREFVALISWSGATTNYADSVKGRFAISRDNGKNTVYLQMNRLKPADTAIYYCAADRRPMGSRSYFEPTEYDDWGQGTQVTVSSGGGGSGGGGSGGGGSTVSSDKTHTCPPCPAPEAAGGPSVFLFPPKPKDTLMISRTPEVTCVVVDVSHEDPEVKFNWYVDGVEVHNAKTKPREEQYNSTYRVVSVLTVLHQDWLNGKEYKCKVSNKALGAPIEKTISKAKGQPREPQVYTLPPSRDELTKNQVSLTCLVKGFYPSDIAVEWESNGQPENNYKTTPPVLDSDGSFLLYSKLTVDKSRWQQGNVFSCSVMHEALHNHYTQKSLSLSPGK

SEQ ID NO: 2029 - protein, 519 aa, synthetic construct
QVQLVESGGGLVQAGGSLRLSCAASGRTFGSTAVGWFRQVPGKEREFVSAINRSGSATTYADSVKGRFTISRDNAKNTVYLQMNSLTPEDTGVYYCAADSLPYGRPYYFQRSAGEYDYWGQGTQVTVSSGGGGSGGGGSGGGGSGSEVQLVESGGGLVQTGGSLRLSCAASGGTFSRDAMAWFRQVPGKEREFVALISWSGATTNYADSVKGRFAISRDNGKNTVYLQMNRLKPADTAIYYCAADRRPMGSRSYFEPTEYDDWGQGTQVTVSSGGGGSGGGGSGGGGSTVSSDKTHTCPPCPAPEAAGGPSVFLFPPKPKDTLMISRTPEVTCVVVDVSHEDPEVKFNWYVDGVEVHNAKTKPREEQYNSTYRVVSVLTVLHQDWLNGKEYKCKVSNKALGAPIEKTISKAKGQPREPQVYTLPPSRDELTKNQVSLTCLVKGFYPSDIAVEWESNGQPENNYKTTPPVLDSDGSFLLYSKLTVDKSRWQQGNVFSCSVMHEALHNHYTQKSLSLSPGK

SEQ ID NO: 2030 - protein, 516 aa, synthetic construct
QVQLVESGGGLVQAGGSLRLSCAASGRTLSRYAMGWFRQAPGSEREFVAASSWGGDTFYADSVEGRFTFSRDNAKNAVYLQMNSLQPEDTAAYYCAAAPTSFPTTAYSSSNSYAYWGQGTQVTVSSGGGGSGGGGSGGGGSGSEVQLVESGGGLVQTGGSLRLSCAASGGTFSRDAMAWFRQVPGKEREFVALISWSGATTNYADSVKGRFAISRDNGKNTVYLQMNRLKPADTAIYYCAADRRPMGSRSYFEPTEYDDWGQGTQVTVSSGGGGSGGGGSGGGGSTVSSDKTHTCPPCPAPEAAGGPSVFLFPPKPKDTLMISRTPEVTCVVVDVSHEDPEVKFNWYVDGVEVHNAKTKPREEQYNSTYRVVSVLTVLHQDWLNGKEYKCKVSNKALGAPIEKTISKAKGQPREPQVYTLPPSRDELTKNQVSLTCLVKGFYPSDIAVEWESNGQPENNYKTTPPVLDSDGSFLLYSKLTVDKSRWQQGNVFSCSVMHEALHNHYTQKSLSLSPGK

SEQ ID NO: 2031 - protein, 507 aa, synthetic construct
QVQLVESGGGLVQAGGSLTLSCAAPGRTFGTDVVGWFRQAPGKEREFVASISRSGDGIYYDDSVKGRFTISRNNAWNTVNLQMNSLKVEDTAVYYCAAGDGWSTYDYWGQGTQVTVSSGGGGSGGGGSGGGGSGSEVQLVESGGGLVQAGGSLRLSCAASGSIFSINAMAWFRQVPGMERELVAAISRDGGASVYRDSVKGRFTISRDNSKNTVYLQMNTLKPEDTAIYVCAATRAIGWTARWITTDFDFWGQGTQVTVSSGGGGSGGGGSGGGGSTVSSDKTHTCPPCPAPEAAGGPSVFLFPPKPKDTLMISRTPEVTCVVVDVSHEDPEVKFNWYVDGVEVHNAKTKPREEQYNSTYRVVSVLTVLHQDWLNGKEYKCKVSNKALGAPIEKTISKAKGQPREPQVYTLPPSRDELTKNQVSLTCLVKGFYPSDIAVEWESNGQPENNYKTTPPVLDSDGSFLLYSKLTVDKSRWQQGNVFSCSVMHEALHNHYTQKSLSLSPGK

SEQ ID NO: 2032 - protein, 515 aa, synthetic construct
QVQLVESGGGLVQAGGSLRLSCAASGRTLSRYAMGWFRQAPGSEREFVAASSWGGDTFYADSVEGRFTFSRDNAKNAVYLQMNSLQPEDTAAYYCAAAPTSFPTTAYSSSNSYAYWGQGTQVTVSSGGGGSGGGGSGGGGSGSEVQLVESGGGLVQAGGSLRLSCAASGSIFSINAMAWFRQVPGMERELVAAISRDGGASVYRDSVKGRFTISRDNSKNTVYLQMNTLKPEDTAIYVCAATRAIGWTARWITTDFDFWGQGTQVTVSSGGGGSGGGGSGGGGSTVSSDKTHTCPPCPAPEAAGGPSVFLFPPKPKDTLMISRTPEVTCVVVDVSHEDPEVKFNWYVDGVEVHNAKTKPREEQYNSTYRVVSVLTVLHQDWLNGKEYKCKVSNKALGAPIEKTISKAKGQPREPQVYTLPPSRDELTKNQVSLTCLVKGFYPSDIAVEWESNGQPENNYKTTPPVLDSDGSFLLYSKLTVDKSRWQQGNVFSCSVMHEALHNHYTQKSLSLSPGK

SEQ ID NO: 2033 - protein, 15 aa, synthetic construct
GGGGSGGGGSGGGGS

SEQ ID NO: 2034 - protein, 227 aa, synthetic construct
DKTHTCPPCPAPEAAGGPSVFLFPPKPKDTLMISRTPEVTCVVVDVSHEDPEVKFNWYVDGVEVHNAKTKPREEQYNSTYRVVSVLTVLHQDWLNGKEYKCKVSNKALGAPIEKTISKAKGQPREPQVYTLPPSRDELTKNQVSLTCLVKGFYPSDIAVEWESNGQPENNYKTTPPVLDSDGSFLLYSKLTVDKSRWQQGNVFSCSVMHEALHNHYTQKSLSLSPGK

SEQ ID NO: 2035 - protein, 227 aa, synthetic construct
DKTHTCPPCPAPEAAGGPSVFLFPPKPKDTLMISRTPEVTCVVVDVSHEDPEVKFNWYVDGVEVHNAKTKPREEQYNSTYRVVSVLTVLHQDWLNGKEYKCKVSNKALGAPIEKTISKAKGQPREPQVYTLPPSRDELTKNQVSLTCLVKGFYPSDIAVEWESNGQPENNYKTTPPVLDSDGSFFLYSRLTVDKSRWQQGNVFSCSVMHEALHNHYTQKSLSLSPGK

SEQ ID NO: 2036 - protein, 272 aa, Homo sapiens
MDSYLLMWGLLTFIMVPGCQAELCDDDPPEIPHATFKAMAYKEGTMLNCECKRGFRRIKSGSLYMLCTGNSSHSSWDNQCQCTSSATRNTTKQVTPQPEEQKERKTTEMQSPMQPVDQASLPGHCREPPPWENEATERIYHFVVGQMVYYQCVQGYRALHRGPAESVCKMTHGKTRWTQPQLICTGEMETSQFPGEEKPQASPEGRPESETSCLVTTTDFQIQTEMAATMETSIFTTEYQVAVAGCVFLLISVLLLSGLTWQRRQRKSRRTI

SEQ ID NO: 2037 - protein, 551 aa, Homo sapiens
MAAPALSWRLPLLILLLPLATSWASAAVNGTSQFTCFYNSRANISCVWSQDGALQDTSCQVHAWPDRRRWNQTCELLPVSQASWACNLILGAPDSQKLTTVDIVTLRVLCREGVRWRVMAIQDFKPFENLRLMAPISLQVVHVETHRCNISWEISQASHYFERHLEFEARTLSPGHTWEEAPLLTLKQKQEWICLETLTPDTQYEFQVRVKPLQGEFTTWSPWSQPLAFRTKPAALGKDTIPWLGHLLVGLSGAFGFIILVYLLINCRNTGPWLKKVLKCNTPDPSKFFSQLSSEHGGDVQKWLSSPFPSSSFSPGGLAPEISPLEVLERDKVTQLLLQQDKVPEPASLSSNHSLTSCFTNQGYFFFHLPDALEIEACQVYFTYDPYSEEDPDEGVAGAPTGSSPQPLQPLSGEDDAYCTFPSRDDLLLFSPSLLGGPSPPSTAPGGSGAGEERMPPSLQERVPRDWDPQPLGPPTPGVPDLVDFQPPPELVLREAGEEVPDAGPREGVSFPWSRPPGQGEFRALNARLPLNTDAYLSLQELQGQDPTHLV

SEQ ID NO: 2038 - protein, 369 aa, Homo sapiens
MLKPSLPFTSLLFLQLPLLGVGLNTTILTPNGNEDTTADFFLTTMPTDSLSVSTLPLPEVQCFVFNVEYMNCTWNSSSEPQPTNLTLHYWYKNSDNDKVQKCSHYLFSEEITSGCQLQKKEIHLYQTFVVQLQDPREPRRQATQMLKLQNLVIPWAPENLTLHKLSESQLELNWNNRFLNHCLEHLVQYRTDWDHSWTEQSVDYRHKFSLPSVDGQKRYTFRVRSRFNPLCGSAQHWSEWSHPIHWGSNTSKENPFLFALEAVVISVGSMGLIISLLCVYFWLERTMPRIPTLKNLEDLVTEYHGNFSAWSGVSKGLAESLQPDYSERLCLVSEIPPKGGALGEGPGASPCNQHSPYWAPPCYTLKPET

SEQ ID NO: 2039 - protein, 480 aa, synthetic construct
QVQLVESGGGLVQAGGSLTLSCAAPGRTFGTDVVGWFRQAPGKEREFVASISRSGDGIYYDDSVKGRFTISRNNAWNTVNLQMNSLKVEDTAVYYCAAGDGWSTYDYWGQGTQVTVSSGGGGSGGGGSGGGGSQVQLVESGGGLVQPGGSLRLSCATSGFTFRNNFMSWVRQAPGKGLEWVSTISYGGESTTYAESVKGRFTISRDNAKNTLYLQMNNLKPEDTAVYYCAKATSYDSIRSGSRGQGTQVTVSSDKTHTCPPCPAPEAAGGPSVFLFPPKPKDTLMISRTPEVTCVVVDVSHEDPEVKFNWYVDGVEVHNAKTKPREEQYNSTYRVVSVLTVLHQDWLNGKEYKCKVSNKALGAPIEKTISKAKGQPREPQVYTLPPSRDELTKNQVSLTCLVKGFYPSDIAVEWESNGQPENNYKTTPPVLDSDGSFFLYSRLTVDKSRWQQGNVFSCSVMHEALHNHYTQKSLSLSPGK

SEQ ID NO: 2040 - protein, 622 aa, synthetic construct
EVQLVESGGGLVQTGGSLRLSCAASGGTFSRDAMAWFRQVPGKEREFVALISWSGATTNYADSVKGRFAISRDNGKNTVYLQMNRLKPADTAIYYCAADRRPMGSRSYFEPTEYDDWGQGTQVTVSSGGGGSGGGGSGGGGSQVQLVESGGGLVQAGGSLTLSCAAPGRTFGTDVVGWFRQAPGKEREFVASISRSGDGIYYDDSVKGRFTISRNNAWNTVNLQMNSLKVEDTAVYYCAAGDGWSTYDYWGQGTQVTVSSGGGGSGGGGSGGGGSQVQLVESGGGLVQPGGSLRLSCATSGFTFRNNFMSWVRQAPGKGLEWVSTISYGGESTTYAESVKGRFTISRDNAKNTLYLQMNNLKPEDTAVYYCAKATSYDSIRSGSRGQGTQVTVSSDKTHTCPPCPAPEAAGGPSVFLFPPKPKDTLMISRTPEVTCVVVDVSHEDPEVKFNWYVDGVEVHNAKTKPREEQYNSTYRVVSVLTVLHQDWLNGKEYKCKVSNKALGAPIEKTISKAKGQPREPQVYTLPPSRDELTKNQVSLTCLVKGFYPSDIAVEWESNGQPENNYKTTPPVLDSDGSFFLYSRLTVDKSRWQQGNVFSCSVMHEALHNHYTQKSLSLSPGK

SEQ ID NO: 2041 - protein, 637 aa, synthetic construct
EVQLVESGGGLVQTGGSLRLSCAASGGTFSRDAMAWFRQVPGKEREFVALISWSGATTNYADSVKGRFAISRDNGKNTVYLQMNRLKPADTAIYYCAADRRPMGSRSYFEPTEYDDWGQGTQVTVSSGGGGSGGGGSGGGGSQVQLVESGGGLVQPGGSLRLSCATSGFTFRNNFMSWVRQAPGKGLEWVSTISYGGESTTYAESVKGRFTISRDNAKNTLYLQMNNLKPEDTAVYYCAKATSYDSIRSGSRGQGTQVTVSSGGGGSGGGGSGGGGSQVQLVESGGGLVQAGGSLTLSCAAPGRTFGTDVVGWFRQAPGKEREFVASISRSGDGIYYDDSVKGRFTISRNNAWNTVNLQMNSLKVEDTAVYYCAAGDGWSTYDYWGQGTQVTVSSGGGGSGGGGSGGGGSDKTHTCPPCPAPEAAGGPSVFLFPPKPKDTLMISRTPEVTCVVVDVSHEDPEVKFNWYVDGVEVHNAKTKPREEQYNSTYRVVSVLTVLHQDWLNGKEYKCKVSNKALGAPIEKTISKAKGQPREPQVYTLPPSRDELTKNQVSLTCLVKGFYPSDIAVEWESNGQPENNYKTTPPVLDSDGSFFLYSRLTVDKSRWQQGNVFSCSVMHEALHNHYTQKSLSLSPGK

SEQ ID NO: 2042 - protein, 495 aa, synthetic construct
QVQLVESGGGLVQPGGSLRLSCATSGFTFRNNFMSWVRQAPGKGLEWVSTISYGGESTTYAESVKGRFTISRDNAKNTLYLQMNNLKPEDTAVYYCAKATSYDSIRSGSRGQGTQVTVSSGGGGSGGGGSGGGGSQVQLVESGGGLVQAGGSLTLSCAAPGRTFGTDVVGWFRQAPGKEREFVASISRSGDGIYYDDSVKGRFTISRNNAWNTVNLQMNSLKVEDTAVYYCAAGDGWSTYDYWGQGTQVTVSSGGGGSGGGGSGGGGSDKTHTCPPCPAPEAAGGPSVFLFPPKPKDTLMISRTPEVTCVVVDVSHEDPEVKFNWYVDGVEVHNAKTKPREEQYNSTYRVVSVLTVLHQDWLNGKEYKCKVSNKALGAPIEKTISKAKGQPREPQVYTLPPSRDELTKNQVSLTCLVKGFYPSDIAVEWESNGQPENNYKTTPPVLDSDGSFFLYSRLTVDKSRWQQGNVFSCSVMHEALHNHYTQKSLSLSPGK

SEQ ID NO: 2043 - protein, 502 aa, synthetic construct
EVQLVESGGGLVQTGGSLRLSCAASGGTFSRDAMAWFRQVPGKEREFVALISWSGATTNYADSVKGRFAISRDNGKNTVYLQMNRLKPADTAIYYCAADRRPMGSRSYFEPTEYDDWGQGTQVTVSSGGGGSGGGGSGGGGSQVQLVESGGGLVQAGGSLTLSCAAPGRTFGTDVVGWFRQAPGKEREFVASISRSGDGIYYDDSVKGRFTISRNNAWNTVNLQMNSLKVEDTAVYYCAAGDGWSTYDYWGQGTQVTVSSGGGGSGGGGSGGGGSDKTHTCPPCPAPEAAGGPSVFLFPPKPKDTLMISRTPEVTCVVVDVSHEDPEVKFNWYVDGVEVHNAKTKPREEQYNSTYRVVSVLTVLHQDWLNGKEYKCKVSNKALGAPIEKTISKAKGQPREPQVYTLPPSRDELTKNQVSLTCLVKGFYPSDIAVEWESNGQPENNYKTTPPVLDSDGSFFLYSRLTVDKSRWQQGNVFSCSVMHEALHNHYTQKSLSLSPGK

SEQ ID NO: 2044 - protein, 637 aa, synthetic construct
QVQLVESGGGLVQPGGSLRLSCATSGFTFRNNFMSWVRQAPGKGLEWVSTISYGGESTTYAESVKGRFTISRDNAKNTLYLQMNNLKPEDTAVYYCAKATSYDSIRSGSRGQGTQVTVSSGGGGSGGGGSGGGGSQVQLVESGGGLVQAGGSLTLSCAAPGRTFGTDVVGWFRQAPGKEREFVASISRSGDGIYYDDSVKGRFTISRNNAWNTVNLQMNSLKVEDTAVYYCAAGDGWSTYDYWGQGTQVTVSSGGGGSGGGGSGGGGSEVQLVESGGGLVQTGGSLRLSCAASGGTFSRDAMAWFRQVPGKEREFVALISWSGATTNYADSVKGRFAISRDNGKNTVYLQMNRLKPADTAIYYCAADRRPMGSRSYFEPTEYDDWGQGTQVTVSSGGGGSGGGGSGGGGSDKTHTCPPCPAPEAAGGPSVFLFPPKPKDTLMISRTPEVTCVVVDVSHEDPEVKFNWYVDGVEVHNAKTKPREEQYNSTYRVVSVLTVLHQDWLNGKEYKCKVSNKALGAPIEKTISKAKGQPREPQVYTLPPSRDELTKNQVSLTCLVKGFYPSDIAVEWESNGQPENNYKTTPPVLDSDGSFFLYSRLTVDKSRWQQGNVFSCSVMHEALHNHYTQKSLSLSPGK

SEQ ID NO: 2045 - protein, 502 aa, synthetic construct
QVQLVESGGGLVQAGGSLTLSCAAPGRTFGTDVVGWFRQAPGKEREFVASISRSGDGIYYDDSVKGRFTISRNNAWNTVNLQMNSLKVEDTAVYYCAAGDGWSTYDYWGQGTQVTVSSGGGGSGGGGSGGGGSEVQLVESGGGLVQTGGSLRLSCAASGGTFSRDAMAWFRQVPGKEREFVALISWSGATTNYADSVKGRFAISRDNGKNTVYLQMNRLKPADTAIYYCAADRRPMGSRSYFEPTEYDDWGQGTQVTVSSGGGGSGGGGSGGGGSDKTHTCPPCPAPEAAGGPSVFLFPPKPKDTLMISRTPEVTCVVVDVSHEDPEVKFNWYVDGVEVHNAKTKPREEQYNSTYRVVSVLTVLHQDWLNGKEYKCKVSNKALGAPIEKTISKAKGQPREPQVYTLPPSRDELTKNQVSLTCLVKGFYPSDIAVEWESNGQPENNYKTTPPVLDSDGSFFLYSRLTVDKSRWQQGNVFSCSVMHEALHNHYTQKSLSLSPGK

SEQ ID NO: 2046 - protein, 482 aa, synthetic construct
QVQLVESGGGLVQPGGSLRLSCATSGFTFRNNFMSWVRQAPGKGLEWVSTISYGGESTTYAESVKGRFTISRDNAKNTLYLQMNNLKPEDTAVYYCAKATSYDSIRSGSRGQGTQVTVSSGGGGSGGGGSGGGGSQVQLVESGGGLVQPGGSLRLSCATSGFTFRNNFMSWVRQAPGKGLEWVSTISYGGESTTYAESVKGRFTISRDNAKNTLYLQMNNLKPEDTAVYYCAKATSYDSIRSGSRGQGTQVTVSSDKTHTCPPCPAPEAAGGPSVFLFPPKPKDTLMISRTPEVTCVVVDVSHEDPEVKFNWYVDGVEVHNAKTKPREEQYNSTYRVVSVLTVLHQDWLNGKEYKCKVSNKALGAPIEKTISKAKGQPREPQVYTLPPSRDELTKNQVSLTCLVKGFYPSDIAVEWESNGQPENNYKTTPPVLDSDGSFLLYSKLTVDKSRWQQGNVFSCSVMHEALHNHYTQKSLSLSPGK

SEQ ID NO: 2047 - protein, 637 aa, synthetic construct
QVQLVESGGGLVQPGGSLRLSCATSGFTFRNNFMSWVRQAPGKGLEWVSTISYGGESTTYAESVKGRFTISRDNAKNTLYLQMNNLKPEDTAVYYCAKATSYDSIRSGSRGQGTQVTVSSGGGGSGGGGSGGGGSEVQLVESGGGLVQTGGSLRLSCAASGGTFSRDAMAWFRQVPGKEREFVALISWSGATTNYADSVKGRFAISRDNGKNTVYLQMNRLKPADTAIYYCAADRRPMGSRSYFEPTEYDDWGQGTQVTVSSGGGGSGGGGSGGGGSQVQLVESGGGLVQAGGSLTLSCAAPGRTFGTDVVGWFRQAPGKEREFVASISRSGDGIYYDDSVKGRFTISRNNAWNTVNLQMNSLKVEDTAVYYCAAGDGWSTYDYWGQGTQVTVSSGGGGSGGGGSGGGGSDKTHTCPPCPAPEAAGGPSVFLFPPKPKDTLMISRTPEVTCVVVDVSHEDPEVKFNWYVDGVEVHNAKTKPREEQYNSTYRVVSVLTVLHQDWLNGKEYKCKVSNKALGAPIEKTISKAKGQPREPQVYTLPPSRDELTKNQVSLTCLVKGFYPSDIAVEWESNGQPENNYKTTPPVLDSDGSFFLYSRLTVDKSRWQQGNVFSCSVMHEALHNHYTQKSLSLSPGK

SEQ ID NO: 2048 - protein, 622 aa, synthetic construct
QVQLVESGGGLVQAGGSLTLSCAAPGRTFGTDVVGWFRQAPGKEREFVASISRSGDGIYYDDSVKGRFTISRNNAWNTVNLQMNSLKVEDTAVYYCAAGDGWSTYDYWGQGTQVTVSSGGGGSGGGGSGGGGSEVQLVESGGGLVQTGGSLRLSCAASGGTFSRDAMAWFRQVPGKEREFVALISWSGATTNYADSVKGRFAISRDNGKNTVYLQMNRLKPADTAIYYCAADRRPMGSRSYFEPTEYDDWGQGTQVTVSSGGGGSGGGGSGGGGSQVQLVESGGGLVQPGGSLRLSCATSGFTFRNNFMSWVRQAPGKGLEWVSTISYGGESTTYAESVKGRFTISRDNAKNTLYLQMNNLKPEDTAVYYCAKATSYDSIRSGSRGQGTQVTVSSDKTHTCPPCPAPEAAGGPSVFLFPPKPKDTLMISRTPEVTCVVVDVSHEDPEVKFNWYVDGVEVHNAKTKPREEQYNSTYRVVSVLTVLHQDWLNGKEYKCKVSNKALGAPIEKTISKAKGQPREPQVYTLPPSRDELTKNQVSLTCLVKGFYPSDIAVEWESNGQPENNYKTTPPVLDSDGSFFLYSRLTVDKSRWQQGNVFSCSVMHEALHNHYTQKSLSLSPGK

SEQ ID NO: 2049 - protein, 637 aa, synthetic construct
QVQLVESGGGLVQAGGSLTLSCAAPGRTFGTDVVGWFRQAPGKEREFVASISRSGDGIYYDDSVKGRFTISRNNAWNTVNLQMNSLKVEDTAVYYCAAGDGWSTYDYWGQGTQVTVSSGGGGSGGGGSGGGGSQVQLVESGGGLVQPGGSLRLSCATSGFTFRNNFMSWVRQAPGKGLEWVSTISYGGESTTYAESVKGRFTISRDNAKNTLYLQMNNLKPEDTAVYYCAKATSYDSIRSGSRGQGTQVTVSSGGGGSGGGGSGGGGSEVQLVESGGGLVQTGGSLRLSCAASGGTFSRDAMAWFRQVPGKEREFVALISWSGATTNYADSVKGRFAISRDNGKNTVYLQMNRLKPADTAIYYCAADRRPMGSRSYFEPTEYDDWGQGTQVTVSSGGGGSGGGGSGGGGSDKTHTCPPCPAPEAAGGPSVFLFPPKPKDTLMISRTPEVTCVVVDVSHEDPEVKFNWYVDGVEVHNAKTKPREEQYNSTYRVVSVLTVLHQDWLNGKEYKCKVSNKALGAPIEKTISKAKGQPREPQVYTLPPSRDELTKNQVSLTCLVKGFYPSDIAVEWESNGQPENNYKTTPPVLDSDGSFFLYSRLTVDKSRWQQGNVFSCSVMHEALHNHYTQKSLSLSPGK

SEQ ID NO: 2050 - protein, 504 aa, synthetic construct
QVQLVESGGGLVQPGGSLRLSCATSGFTFRNNFMSWVRQAPGKGLEWVSTISYGGESTTYAESVKGRFTISRDNAKNTLYLQMNNLKPEDTAVYYCAKATSYDSIRSGSRGQGTQVTVSSGGGGSGGGGSGGGGSEVQLVESGGGLVQTGGSLRLSCAASGGTFSRDAMAWFRQVPGKEREFVALISWSGATTNYADSVKGRFAISRDNGKNTVYLQMNRLKPADTAIYYCAADRRPMGSRSYFEPTEYDDWGQGTQVTVSSGGGGSGGGGSGGGGSDKTHTCPPCPAPEAAGGPSVFLFPPKPKDTLMISRTPEVTCVVVDVSHEDPEVKFNWYVDGVEVHNAKTKPREEQYNSTYRVVSVLTVLHQDWLNGKEYKCKVSNKALGAPIEKTISKAKGQPREPQVYTLPPSRDELTKNQVSLTCLVKGFYPSDIAVEWESNGQPENNYKTTPPVLDSDGSFLLYSKLTVDKSRWQQGNVFSCSVMHEALHNHYTQKSLSLSPGK

SEQ ID NO: 2051 - protein, 489 aa, synthetic construct
EVQLVESGGGLVQTGGSLRLSCAASGGTFSRDAMAWFRQVPGKEREFVALISWSGATTNYADSVKGRFAISRDNGKNTVYLQMNRLKPADTAIYYCAADRRPMGSRSYFEPTEYDDWGQGTQVTVSSGGGGSGGGGSGGGGSQVQLVESGGGLVQPGGSLRLSCATSGFTFRNNFMSWVRQAPGKGLEWVSTISYGGESTTYAESVKGRFTISRDNAKNTLYLQMNNLKPEDTAVYYCAKATSYDSIRSGSRGQGTQVTVSSDKTHTCPPCPAPEAAGGPSVFLFPPKPKDTLMISRTPEVTCVVVDVSHEDPEVKFNWYVDGVEVHNAKTKPREEQYNSTYRVVSVLTVLHQDWLNGKEYKCKVSNKALGAPIEKTISKAKGQPREPQVYTLPPSRDELTKNQVSLTCLVKGFYPSDIAVEWESNGQPENNYKTTPPVLDSDGSFLLYSKLTVDKSRWQQGNVFSCSVMHEALHNHYTQKSLSLSPGK

SEQ ID NO: 2052 - protein, 347 aa, synthetic construct
QVQLVESGGGLVQPGGSLRLSCATSGFTFRNNFMSWVRQAPGKGLEWVSTISYGGESTTYAESVKGRFTISRDNAKNTLYLQMNNLKPEDTAVYYCAKATSYDSIRSGSRGQGTQVTVSSDKTHTCPPCPAPEAAGGPSVFLFPPKPKDTLMISRTPEVTCVVVDVSHEDPEVKFNWYVDGVEVHNAKTKPREEQYNSTYRVVSVLTVLHQDWLNGKEYKCKVSNKALGAPIEKTISKAKGQPREPQVYTLPPSRDELTKNQVSLTCLVKGFYPSDIAVEWESNGQPENNYKTTPPVLDSDGSFLLYSKLTVDKSRWQQGNVFSCSVMHEALHNHYTQKSLSLSPGK

SEQ ID NO: 2053 - protein, 353 aa, synthetic construct
QVQLVESGGGLVQAGGSLRLSCAASGIPFDNYAMGWFRQAPGKEREFVAARDLEGIITRYGDSVKGRFTISRGNAKNTVFLQMNSLKPEDTAVYYCAARDGGVVAGSRSSAQYNYWGQGTQVTVSSDKTHTCPPCPAPEAAGGPSVFLFPPKPKDTLMISRTPEVTCVVVDVSHEDPEVKFNWYVDGVEVHNAKTKPREEQYNSTYRVVSVLTVLHQDWLNGKEYKCKVSNKALGAPIEKTISKAKGQPREPQVYTLPPSRDELTKNQVSLTCLVKGFYPSDIAVEWESNGQPENNYKTTPPVLDSDGSFLLYSKLTVDKSRWQQGNVFSCSVMHEALHNHYTQKSLSLSPGK

SEQ ID NO: 2054 - protein, 354 aa, synthetic construct
QVQLVESGGGLVQAGGSLRLSCAASGGTFRTRNMGWFRRAPGKEREFVAAVSWNVDNKLYADSVKGRFTISRDNGRNMVYLQMNSLKPEDTAVYYCAADNIPLSSDMRPTATEYDYWGQGTQVTVSSDKTHTCPPCPAPEAAGGPSVFLFPPKPKDTLMISRTPEVTCVVVDVSHEDPEVKFNWYVDGVEVHNAKTKPREEQYNSTYRVVSVLTVLHQDWLNGKEYKCKVSNKALGAPIEKTISKAKGQPREPQVYTLPPSRDELTKNQVSLTCLVKGFYPSDIAVEWESNGQPENNYKTTPPVLDSDGSFLLYSKLTVDKSRWQQGNVFSCSVMHEALHNHYTQKSLSLSPGK

SEQ ID NO: 2055 - protein, 352 aa, synthetic construct
EVQLVESGGGLVQAGGSLRLSCAASGGSIYTYNMGWFRQAPGKEREFVAGTLWSGGDSVYADFAKGRFTLSRENAKNTLYLQMNSLKPEDTATYYCAIDPLSLTSDWRVDELSSWGKGTLVTVSSDKTHTCPPCPAPEAAGGPSVFLFPPKPKDTLMISRTPEVTCVVVDVSHEDPEVKFNWYVDGVEVHNAKTKPREEQYNSTYRVVSVLTVLHQDWLNGKEYKCKVSNKALGAPIEKTISKAKGQPREPQVYTLPPSRDELTKNQVSLTCLVKGFYPSDIAVEWESNGQPENNYKTTPPVLDSDGSFLLYSKLTVDKSRWQQGNVFSCSVMHEALHNHYTQKSLSLSPGK

SEQ ID NO: 2056 - protein, 352 aa, synthetic construct
QLQLVESGGGLVQAGDSLRLSCAASGFNFGWHAMGWFRQAPGKEREFVATITWTGRDTYYADSVRGRFTISKDNAKDTLFLQMNSLRPDDTGVYYCAKARERATWAYSEDDCDYWGQGTQVTVSSDKTHTCPPCPAPEAAGGPSVFLFPPKPKDTLMISRTPEVTCVVVDVSHEDPEVKFNWYVDGVEVHNAKTKPREEQYNSTYRVVSVLTVLHQDWLNGKEYKCKVSNKALGAPIEKTISKAKGQPREPQVYTLPPSRDELTKNQVSLTCLVKGFYPSDIAVEWESNGQPENNYKTTPPVLDSDGSFLLYSKLTVDKSRWQQGNVFSCSVMHEALHNHYTQKSLSLSPGK
